(19) United States
(12) Patent Application Publication
(10) Pub. No.: US 2008/0279893 A1
(43) Pub. Date: Nov. 13, 2008

(54) Lawsonia intracellularis immunological proteins

(75) Inventors: Eric Vaughn, Ames, IA (US); Merrill Schaeffer, St. Joseph, MO (US); Yajie Liang, Ames, IA (US)

Correspondence Address: Tracey S. Truitt;Erickson & Kleypas, L.L.C., 800 W. 47th Street, Suite 401, Kansas City, MO, 64112, US

(73) Assignee: Boehringer Ingelheim Vetmedica, Inc.

(21) Appl. No.: 11/414,764

(22) Filed: Apr. 28, 2006

Related U.S. Application Data
(60) Provisional application No. 60/675,806, filed on Apr. 28, 2005.

(51) Int. Cl. A61K 39/00; C07K 14/00; C12N 15/11; C12N 15/00; G01N 33/569; A61K 31/70; A61K 38/00

(52) U.S. Cl. 424/234.1; 530/350; 536/23.7; 435/320.1; 514/44; 514/12; 435/7.32

(57) ABSTRACT

The present invention provides nucleic acid and amino acid sequences useful as the immunogenic portion of vaccines or immunogenic compositions effective for lessening the severity of the clinical symptoms associated with Lawsonia intracellularis infection or conferring protective immunity to an animal susceptible to such infection. Preferred amino acid sequences are selected from the group consisting of 1) a polypeptide comprising a sequence selected from the group consisting of SEQ ID Nos.: 1-455, SEQ ID No 466, or the polypeptide encoded by SEQ ID No: 456, SEQ ID No: 457 or SEQ ID No: 466; 2) any polypeptide that has at least 85% sequence homology, more preferably at least about 90% sequence homology, still more preferably at least about 95% sequence homology, even more preferably at least about 97% sequence homology, still even more preferably at least about 98% sequence homology, and even more preferably at least about 99% sequence homology to the polypeptide of 1); 3) any immunogenic portion of the polypeptides of 1) and/or 2) 4) the immunogenic portion of 3), comprising at least 300, 290, 280, 270, 260, 250, 240, 230, 220, 210, 200, 190, 180, 170, 160, 150, 140, 130, 120, 110, 100, 90, 80, 70, 60, 50, 45, 40, 35, 30, 25, 20, 18, 15, 13, 10, or most preferably 9 contiguous amino acids included in the sequences of SEQ ID No: 1-455, SEQ ID No: 456, or the amino acid sequence encoded by SEQ ID No: 457 or SEQ ID No: 466; and/or 5) a polypeptide that is encoded by a DNA that codes for a peptide comprising the sequence of SEQ ID No: 1-455 or SEQ ID No: 466. Thus, the nucleic acid sequences encoding such proteins, or the proteins themselves are included in vaccine compositions, together with veterinary-acceptable carrier and administered to an animal in need thereof.

### RELATED APPLICATIONS

[0001] This application claims the benefit of provisional application Ser. No. 60/675,806, filed on Apr. 28, 2005, the teachings and contents of which are hereby incorporated by reference.

### SEQUENCE LISTING

[0002] This application contains a sequence listing in computer readable format, the teachings and content of which are hereby incorporated by reference.

### BACKGROUND OF THE INVENTION

[0003] 1. Field of the Invention

[0004] The present application is concerned with antigens of Lawsonia intracellularis and their use. More particularly, the present application is concerned with antigens that are immunologically relevant proteins and the nucleic acid sequences or DNA molecules encoding those proteins and vectors including DNA molecules coding for immunological proteins of Lawsonia intracellularis. Even more particularly, the present invention is concerned with the identification of such proteins and nucleic acid sequences. Still more particularly, the present invention is concerned with determining whether such proteins or nucleic acid sequences are good candidates for use in a subunit vaccine by their location. Even more particularly, the present invention is concerned with such proteins and nucleic acid sequences that are capable of invoking an immune response in a host animal. Still more particularly, the present application is concerned with such proteins and nucleic acid sequences and their incorporation into an immunogenic composition as well as the subsequent administration of such a composition to a host animal. The proteins and/or nucleic acid sequences can be used as a component in a vaccine and the vaccine used to provide a degree of protective immunity against and/or a lessening of the clinical symptoms associated with infection by Lawsonia intracellularis. The present application is also concerned with methods of producing and administering vaccines comprising such nucleic acid sequences or the proteins encoded thereby. Finally, the present application is concerned with diagnostic tests for the detection of Lawsonia intracellularis as well as methods of producing and administering vaccine incorporating such Lawsonia intracellularis antigens.

[0005] 2. Description of the Prior Art

[0006] Lawsonia Intracellularis is the causative agent of porcine proliferative interopathy (“PPE”), and it effects virtually all animals, including humans, rabbits, ferrets, hamsters, fox, horses, and other animals as diverse as ostriches and emus. PPE is a common diarrheal disease of growing-finishing and young breeding pigs characterized by hyperplasia and inflammation of the ileum and colon. It often is mild and self-limiting but sometimes causes persistent diarrhea, depression, reduced appetite, reluctance to move, retarded growth, increased FCR, severe necrotic enteritis, or hemorrhagic enteritis with high mortality. The bacteria itself is an obligate, intracellular bacterium.

[0007] The bacteria associated with PPE have been referred to as “Campylobacter-like organisms.” S. McOrist et al., Vet. Pathol., Vol. 26, 260-264 (1989). Subsequently, the causative bacteria have been identified as a novel taxonomic genus and species, vernacularly referred to as Ileal symbiont (IS) intracellularis. C. Gebhart et al., Int'l. J. of Systemic Bacteriology, Vol. 43, No. 3, 533-538 (1993). More recently, these novel bacteria have been given the taxonomic name Lawsonia (L.) intracellularis. S. McOrist et al., Int'l. J. of Systemic Bacteriology, Vol. 45, No. 4, 820-825 (1995). These three names have been used interchangeably to refer to the same organism as further identified and described herein. Koch's postulates have been fulfilled by inoculation of pure cultures of L intracellularis into conventionally reared pigs; typical lesions of the disease were produced, and L intracellularis was reisolated from the lesions. The more common, nonhemorrhagic form of the disease often affects 18- to 36-kg pigs and is characterized by sudden onset of diarrhea. The feces are watery to pasty, brownish, or faintly blood stained. After ˜2 days, pigs may pass yellow fibrinonecrotic casts that have formed in the ileum. Most affected pigs recover spontaneously, but a significant number develop chronic necrotic enteritis with progressive emaciation. The hemorrhagic form is characterized by cutaneous pallor, weakness, and passage of hemorrhagic or black, tarry feces. Pregnant gilts may abort. Lesions may occur anywhere in the lower half of the small intestine, cecum, or colon but are most frequent and obvious in the ileum. The wall of the intestine is thickened, and the mesenterymaybe edematous. The mesenteric lymph nodes are enlarged. The intestinal mucosa appears thickened and rugose, may be covered with a brownish or yellow fibrinonecrotic membrane, and sometimes has petechial hemorrhages. Yellow necrotic casts may be found in the ileum or passing through the colon. Diffuse, complete mucosal necrosis in chronic cases causes the intestine to be rigid, resembling a garden hose. Proliferative mucosal lesions often are in the colon but are detected only by careful inspection at necropsy. In the profusely hemorrhagic form, there are red or black, tarry feces in the colon and clotted blood in the ileum. Altogether, L. intracellularis is a particularly great cause of losses in swine herds in Europe as well as in the United States.

[0008] L. intracellularis is an obligate, intracellular bacterium which cannot be cultured by normal bacteriological methods on conventional cell-free media and has been thought to require cells for growth. S. McOrist et al., Infection and Immunity, Vol. 61, No. 19, 4286-4292 (1993) and G. Lawson et al., J. of Clinical Microbiology, Vol. 31, No. 5, 1136-1142 (1993) discuss cultivation of L. intracellularis using IEC-18 rat intestinal epithelial cell monolayers in conventional tissue culture flasks. In U.S. Pat. Nos. 5,714,375 and 5,885,823, both of which are herein incorporated by reference in their entireties, cultivation of L. intracellularis in suspended host cells was described.

[0009] Pathogenic and non-pathogenic attenuated bacteria strains of L. intracellularis are well known in state of the art. For example, WO 96/39629 and WO 05/011731 describe non-pathogenic attenuated strains of L. intracellularis. Further attenuated bacteria strains of L. intracellularis are known from WO 02/26250 and WO 03/00665.

[0010] What is needed in the art is a vaccine effective against Lawsonia intracellularis infection, which provides or confers protective immunity to an animal and/or reduces the severity of clinical symptoms associated with Lawsonia intracellularis infection. What is further needed are methods of making and administering such vaccines.

### SUMMARY OF THE INVENTION

[0011] The present invention overcomes the problems inherent in the prior art and provides a distinct advance in the state of the art. Specifically, this invention concerns antigens comprising immunological proteins derived from Lawsonia intracellularis and their use in the vaccination of swine against infection by Lawsonia intracellularis. Preferably, the proteins will elicit a humoral immune response during the normal course of infection in swine. These proteins, both individually and in combination, will be useful as a component in a protein subunit vaccine that invokes an immune response and provides protective immunity against or a lessening of the clinical symptoms associated with Lawsonia intracellularis infection. The identified proteins can then be generated by any conventional means and used in a vaccine.

[0012] The Lawsonia intracellularis DK15540 genomic nucleotide sequence was analyzed for the presence of nucleotide sequences that would encode proteins having a minimum length of 300 amino acids. Altogether, 456 protein sequences having at least 300 amino acids were identified. These sequences corresponded to SEQ ID Nos. 1-455 and 466. These protein sequences were further analyzed using two separate computer programs, PSORT and CELLO. The purpose of this analysis was to identify proteins of interest that were 300 amino acids or longer, and find or predict their location in Lawsonia intracelluaris. Knowledge of the location of a protein will indicate the suitability of a protein for use in a subunit vaccine to one of skill in the art. The PSORT program is used to predict subcellular localization and is hosted by the Brinkman Laboratory at Simon Fraser University and can be found at psort.org. The CELLO program uses a Support Vector Machine based on n-peptide composition to assign a Gram-negative protein to the cytoplasm, inner membrane, periplasm, outer membrane or extracellular space and is found at cello.life.nctu.edu.tw. Generally, the suitability of a protein as a component in a subunit vaccine is, in increasing order of suitability, cytoplasmic, inner membrane, periplasmic, outer membrane, and extracellular. In other words, extracellular proteins provide the greatest likelihood of effectiveness for vaccines, while cytoplasmic proteins provide the least likelihood of suitability. This is because such proteins are more exposed and accessible for the inducement of an immune response. Using CELLO, extracellular proteins included SEQ ID Nos. 6, 329, 296, 413, 194, 143, 146, 333, 438, 188, 261, 237, 336, 291, 151, 26, 139, 333, 444, 308, 131, 284, and 340, or an immunogenic portion thereof; outer membrane proteins included SEQ ID Nos. 355, 11, 378, 50, 35, 231, 4, 328, 313, 27, 172, 275, 387, 134, 201, 256, 2, 12, 404, 388, 327, 306, 415, 343, 373, 214, 330, 316, 428, 190, 129, 320, 381, 9, 292, 158, 270, 336, 423, 211, 178, 430, 77, 186, 264, 140, 193, 192, 208, 183, 108, 109, 87, 253, 379, 243, 364, 51, 99, 419, 278, 295, 349, 219, 127, 389, 254, 263, 294, 315, 257, 443, 403, 76, 75, 73, 344, 74, and 238, or an immunogenic portion thereof; periplasmic proteins included SEQ ID Nos. 6,132,421, 112, 110, 310, 247, 205, and 7, or an immunogenic portion thereof; inner membrane proteins included SEQ ID Nos. 228, 452, 144, 323, 305, 357, 360, 95, 130, 34, 405, 118, 451, 299, 48, 376, 358, 377, 352, 39, 106, 258, 309, 445, 195, 311, 179, 410, 265, 249, 354, 398, 408, 20, 44, 68, 31, 153, 187, 345, 69, 366, 348, 1, 324, 281, 88, 239, 36, 276, 29, 104, 70, 426, 302, 314, 369, 418, 58, 166, 384, 107, 18, 272, 41, 200, 180, 92, 386, 156, 455, 383, 361, 116, 277, 55, 252, 32, 93, 241, 120, 229, 121, 89, 382, and 250, or an immunogenic portion thereof; and cytoplasmic proteins included SEQ ID Nos. 6, 79, 346, 332, 11, 53, 81, 8, 21, 435, 234, 185, 450, 5347, 424, 326, 155, 215, 399, 209, 216, 416, 147, 313, 157, 342, 343, 293, 271, 337, 72, 269, 103, 64, 425, 148, 341, 24, 285, 289, 429, 268, 177, 405, 260, 407, 100, 442, 321, 370, 47, 353, 80, 67, 436, 30, 220, 397, 212, 96, 149, 119, 273, 105, 85, 15, 3, 232, 40, 225, 420, 19, 286, 259, 196, 207, 176, 280, 431, 160, 367, 168, 128, 124, 394, 126, 5, 255, 242, 46, 152, 16, 65, 433, 167, 221, 414, 287, 412, 111, 303, 449, 114, 233, 406, 25, 210, 61, 203, 86, 141, 171, 447, 266, 437, 173, 78, 199, 319, 400, 392, 351, 184, 43, 217, 189, 174, 409, 204, 396, 83, 335, 98, 224, 113, 372, 301, 164, 246, 56, 175, 262, 226, 17, 362, 338, 267, 35.6, 25.1, 300, 62, 14, 350, 37, 202, 159, 115, 331, 317, 163, 38, 240, 318, 236, 304, 439, 191, 244, 97, 417, 133, 123, 22, 359, 165, 385, 218, 162, 102, 223, 283, 453, 290, 402, 71, 446, 380, 339, 122, 161, 117, 390, 82, 427, 371, 454, 49, 368, 28, 10, 42, 63, 57, 59, 54, 136, 84, 181, 60, 90, 52, 125, 230, 142, 440, 197, 363, 23, 325, 154, 227, 282, 213, 33, 391, 91, 312, 198, 101, 45, 422, 298, 448, 375, 274, 150, 206, 374, 248, 393, 222, 288, 235, 66, 182, 307, 334, 322, 169, 279, 13, 395, 434, 365, 137, 145, 170, 401, 441, 138, 94, 245, 411, and 135, or an immunogenic portion thereof. Moreover, the order provided in each of the CELLO prediction lists above provides the proteins in order, from least suitable of the group to most suitable, for vaccine purposes. Thus, for purposes of the present invention, it is preferred to use a Lawsonia intracellularis protein. More preferably, it is preferred to use a sequence selected from the group consisting of SEQ ID Nos. 1-455 and 466, as well as the proteins encoded by SEQ ID Nos. 456 and 457. Still more preferably, it is preferred to use an extracellular or outer membrane protein, and even more preferably, a protein selected from the group consisting of SEQ ID Nos. 355, 11, 378, 50, 35, 231, 4, 328, 313, 27, 172, 275, 387, 134, 201, 256, 2, 12, 404, 388, 327, 306, 415, 343, 373, 214, 330, 316, 428, 190, 129, 320, 381, 9, 292, 158, 270, 336, 423, 211, 178, 430, 77, 186, 264, 140, 193, 192, 208, 183, 108, 109, 87, 253, 379, 243, 364, 51, 99, 419, 278, 295, 349, 219, 127, 389, 254, 263, 294, 315, 257, 443, 403, 76, 75, 73, 344, 74, 238, 6, 329, 296, 413, 194, 143, 146, 333, 438, 188, 261, 237, 336, 291, 151, 26, 139, 333, 444, 308, 131, 284, and 340, or any immunogenic portion, or homolog of the above-mentioned Lawsonia proteins, or any immunogenic portion of said homolog. Again, these proteins are listed in order of increasing suitability for use in a subunit vaccine. Still more preferably, extracellular proteins are used, and even more preferably, the protein is selected from the group consisting of SEQ ID Nos. 6, 329, 296, 413, 194, 143, 146, 333, 438, 188, 261, 237, 336, 291, 151, 26, 139, 333, 444, 308, 131, 284, and 340, or any immunogenic portion, or homolog of the above-mentioned Lawsonia proteins, or any immunogenic portion of said homolog. The complete CELLO results are included in Table 1 of U.S. Ser. No. 60/675,806, the application to which benefit is claimed herein.

[0013] Using PSORT, extracellular proteins (ECSVM—Localization) included SEQ ID Nos. 237, 292, and 327; outer membrane proteins (OMSVM—Localization) included SEQ ID Nos. 51, 108, 140, 193, 194, 211, 217, 219, 237, 256, 257, 269, 278, 284, 292, 294, 315, 327, 329, 344, 349, 389, and 403; outer membrane proteins identified by Motif—Localization included SEQ ID Nos. 32, 70, and 155; no periplasmic proteins were identified using PPSVM—Localization; periplasmic proteins identified using Motif-Localization included 187, 250, 272, and 303; inner membrane proteins identified by CMSVN—Localization included SEQ ID Nos. 1, 16, 18, 20, 29, 31, 32, 41, 44, 55, 58, 68, 69, 70, 88, 89, 92, 93, 104, 107, 116, 120, 121, 153, 156, 166, 179, 180, 187, 195, 200, 229, 239, 241, 250, 252, 272, 276, 277, 300, 302, 314, 324, 345, 348, 361, 366, 369, 382, 383, 384, 386, 408, 410, 418, 426, 432, and 455; inner membrane proteins identified using HMMTOP—Localization included SEQ ID Nos. 16, 18, 20, 29, 31, 32, 36, 41, 44, 53, 55, 58, 67, 68, 69, 70, 74, 77, 88, 89, 92, 93, 104, 107, 114, 116, 120, 121, 140, 146, 153, 156, 166, 179, 180, 187, 195, 200, 201, 211, 229, 239, 241, 242, 250, 252, 265, 272, 276, 277, 278, 281, 292, 302, 310, 311, 314, 324, 341, 345, 348, 354, 355, 361, 366, 369, 382, 383, 384, 386, 404, 408, 410, 418, 424, 426, 427, 432, 443, and 455; and cytoplasmic proteins identified using CytoSVM—Localization included SEQ ID Nos. 5, 8, 10, 13, 17, 22, 23, 24, 30, 33, 37, 38, 42, 43, 45, 49, 52, 54, 60, 62, 63, 64, 84, 85, 86, 90, 91, 94, 98, 101, 113, 125, 133, 135, 136, 137, 138, 142, 145, 150, 152, 154, 155, 165, 168, 169, 170, 171, 173, 174, 175, 176, 181, 182, 189, 197, 198, 202, 206, 213, 214, 218, 220, 221, 222, 223, 224, 226, 227, 230, 235, 236, 240, 242, 245, 247, 248, 254, 255, 268, 274, 279, 282, 288, 293, 295, 298, 303, 304, 307, 312, 313, 317, 325, 330, 334, 338, 350, 352, 353, 356, 362, 363, 365, 368, 371, 372, 374, 375, 380, 385, 390, 392, 394, 395, 400, 401, 402, 406, 407, 409, 411, 412, 417, 420, 422, 431, 433, 434, 437, 439, 440, 441, 443, 448, 453, and 454. The complete PSORT results were provided in Table 2 of U.S. Ser. No. 60/675,806.

[0014] Next, each of the sequences were searched through BLAST in order to find other proteins that were homologous to the 456 Lawsonia proteins. The results of this BLAST searching is contained herein as FIG. 5.

[0015] Finally, amino acid alignments between the Lawsonia DK15540 hemolysin and Omp85-like proteins with Desulfovibria were provided in TABLE 3 of U.S. Ser. No. 60/675,806.

[0016] As used herein, the following definitions will apply: “Sequence Identity” as it is known in the art refers to a relationship between two or more polypeptide sequences or two or more polynucleotide sequences, namely a reference sequence and a given sequence to be compared with the reference sequence. Sequence identity is determined by comparing the given sequence to the reference sequence after the sequences have been optimally aligned to produce the highest degree of sequence similarity, as determined by the match between strings of such sequences. Upon such alignment, sequence identity is ascertained on a position-by-position basis, e.g., the sequences are “identical” at a particular position if at that position, the nucleotides or amino acid residues are identical. The total number of such position identities is then divided by the total number of nucleotides or residues in the reference sequence to give % sequence identity. Sequence identity can be readily calculated by known methods, including but not limited to, those described in Computational Molecular Biology, Lesk, A. N., ed., Oxford University Press, New York (1988), Biocomputing: Informatics and Genome Projects, Smith, D. W., ed., Academic Press, New York (1993); Computer Analysis of Sequence Data, Part I, Griffin, A. M., and Griffin, H. G., eds., Humana Press, New Jersey (1994); Sequence Analysis in Molecular Biology, von Heinge, G., Academic Press (1987); Sequence Analysis Primer, Gribskov, M. and Devereux, J., eds., M. Stockton Press, New York (1991); and Carillo, H., and Lipman, D., SIAM J. Applied Math., 48: 1073 (1988), the teachings of which are incorporated herein by reference. Preferred methods to determine the sequence identity are designed to give the largest match between the sequences tested. Methods to determine sequence identity are codified in publicly available computer programs which determine sequence identity between given sequences. Examples of such programs include, but are not limited to, the GCG program package (Devereux, J., et al., Nucleic Acids Research, 12(1):387 (1984)), BLASTP, BLASTN and FASTA (Altschul, S. F. et al., J. Molec. Biol., 215:403-410 (1990). The BLASTX program is publicly available from NCBI and other sources (BLAST Manual, Altschul, S. et al., NCVI NLM NIH Bethesda, Md. 20894, Altschul, S. F. et al., J. Molec. Biol., 215:403-410 (1990), the teachings of which are incorporated herein by reference). These programs optimally align sequences using default gap weights in order to produce the highest level of sequence identity between the given and reference sequences. As an illustration, by a polynucleotide having a nucleotide sequence having at least, for example, 95% “sequence identity” to a reference nucleotide sequence, it is intended that the nucleotide sequence of the given polynucleotide is identical to the reference sequence except that the given polynucleotide sequence may include up to 5 point mutations per each 100 nucleotides of the reference nucleotide sequence. In other words, in a polynucleotide having a nucleotide sequence having at least 95% identity relative to the reference nucleotide sequence, up to 5% of the nucleotides in the reference sequence may be deleted or substituted with another nucleotide, or a number of nucleotides up to 5% of the total nucleotides in the reference sequence may be inserted into the reference sequence. These mutations of the reference sequence may occur at the 5′ or 3′ terminal positions of the reference nucleotide sequence or anywhere between those terminal positions, interspersed either individually among nucleotides in the reference sequence or in one or more contiguous groups within the reference sequence. Analogously, by a polypeptide having a given amino acid sequence having at least, for example, 95% sequence identity to a reference amino acid sequence, it is intended that the given amino acid sequence of the polypeptide is identical to the reference sequence except that the given polypeptide sequence may include up to 5 amino acid alterations per each 100 amino acids of the reference amino acid sequence. In other words, to obtain a given polypeptide sequence having at least 95% sequence identity with a reference amino acid sequence, up to 5% of the amino acid residues in the reference sequence may be deleted or substituted with another amino acid, or a number of amino acids up to 5% of the total number of amino acid residues in the reference sequence may be inserted into the reference sequence. These alterations of the reference sequence may occur at the amino or the carboxy terminal positions of the reference amino acid sequence or anywhere between those terminal positions, interspersed either individually among residues in the reference sequence or in the one or more contiguous groups within the reference sequence. Preferably, residue positions which are not identical differ by conservative amino acid substitutions. However, conservative substitutions are not included as a match when determining sequence identity.

[0017] Similarly, “sequence homology”, as used herein, also refers to a method of determining the relatedness of two sequences. To determine sequence homology, two or more sequences are optimally aligned as described above, and gaps are introduced if necessary. However, in contrast to “sequence identity”, conservative amino acid substitutions are counted as a match when determining sequence homology. In other words, to obtain a polypeptide or polynucleotide having 95% sequence homology with a reference sequence, 95% of the amino acid residues or nucleotides in the reference sequence must match or comprise a conservative substitution with another amino acid or nucleotide, or a number of amino acids or nucleotides up to 5% of the total amino acid residues or nucleotides, not including conservative substitutions, in the reference sequence may be inserted into the reference sequence.

[0018] A “conservative substitution” refers to the substitution of an amino acid residue or nucleotide with another amino acid residue or nucleotide having similar characteristics or properties including size, hydrophobicity, etc., such that the overall functionality does not change significantly.

[0019] “Isolated” means altered “by the hand of man” from its natural state, i.e., if it occurs in nature, it has been changed or removed from its original environment, or both. For example, a polynucleotide or polypeptide naturally present in a living organism is not “isolated,” but the same polynucleotide or polypeptide separated from the coexisting materials of its natural state is “isolated”, as the term is employed herein.

[0020] In general, each sequence described herein including the protein sequences and the DNA encoding such proteins also covers proteins and DNA sequences having certain percentages of sequence homology or sequence identity relative to the disclosed sequences. While it is preferred to have high percentages of sequence homology or identity, it is more preferred to retain the functions of the claimed sequence than the sequence per se. In other words, those of skill in the art will be able to make minor changes to the sequences disclosed herein yet retain the functionality of the disclosed sequences with such “derivative” sequences. Conservative substitutions would be one preferred method of making changes to the sequence while still preserving functionality. Preferably the present invention will embrace other sequences including derivative sequences that are based on the sequences disclosed herein. Such other sequences will preferably have at least about 85% sequence identity or homology, more preferably at least about 90% sequence identity or homology, still more preferably at least about 95% sequence identity or homology, even more preferably at least about 97% sequence identity or homology, still even more preferably at least about 98% sequence identity or homology, and even more preferably at least about 99% sequence identity or homology with a sequence disclosed herein. Preferably, such homology exists over a lengths of at least 25 amino acids/nucleotides, more preferably at least 50 amino acids/nucleotides, even more preferably at least 75 amino acids/nucleotides, still even more preferably at least 150 amino acids/nucleotides, even more preferably at least 200 amino acids/nucleotides, even more preferably at least 250 amino acids/nucleotides, and most preferably, at least 300 amino acids/nucleotides.

[0021] Additionally, it is understood that the protein sequences described herein are useful in immunogenic compositions and that some stretches or portions of these sequences play a greater role in inducing an immune response than others. This means that sufficient immune responses could be induced by using just selected portions of these proteins, provided that the selected portions were of sufficient length to generate an immune response. Accordingly, the invention covers any immunogenic portion of the proteins described herein. Moreover, the invention also covers any DNA molecules encoding for those immunogenic stretches or portions. Generally, such stretches or portions will comprise the sequence of contiguous amino acids/nucleotides up to the entire length of the sequence. More preferably, such stretches or portions will, in ascending order of preference, have at least 300, 290, 280, 270, 260, 250, 240, 230, 220, 210, 200, 190, 180, 170, 160, 150, 140, 130, 120, 110, 100, 90, 80, 70, 60, 50, 45, 40, 35, 30, 25, 20, 18, 15, 13, 10, 9, or most preferably 8 contiguous amino acids from the disclosed sequence, or any homolog thereof. When related to a DNA molecule, such stretches or portions will, in ascending order of preference, encoding for at least 300, 290, 280, 270, 260, 250, 240, 230, 220, 210, 200, 190, 180, 170, 160, 150, 140, 130, 120, 110, 100, 90, 80, 70, 60, 50, 45, 40, 35, 30, 25, 20, 18, 15, 13, 10, 9, or most preferably 8 contiguous amino acids from the disclosed sequence. Preferably, said homolog sequences will preferably have at least about 85% sequence identity or homology, more preferably at least about 90% sequence identity or homology, still more preferably at least about 95% sequence identity or homology, even more preferably at least about 97% sequence identity or homology, still even more preferably at least about 98% sequence identity or homology, and even more preferably at least about 99% sequence identity or homology with a sequence disclosed herein. As with the sequences themselves, such stretches are also operable for manipulation without loss of function by those of skill in the art. Accordingly, the sequence homology and sequence identity definitions also apply to these stretches or portions of the disclosed proteins.

[0022] As used herein, the term “L. intracellularis” or “Lawsonia intracellularis” or “Lawsonia” means the intracellular, curved gram-negative bacteria described in detail by C. Gebhart et al., Int'l. J. of Systemic Bacteriology, Vol. 43, No. 3, 533-538 (1993) and S. McOrist et al., Int'l. J. of Systemic Bacteriology, Vol. 45, No. 4, 820-825 (1995), each of which is incorporated herein by reference in their entireties, and includes but is not limited to the isolates described in WO 96/39629 and WO 05/011731. In particular, the term “L. intracellularis” also means, but is not limited to the isolates deposited under the Budapest Treaty with the American Type Culture Collection, 10801 University Boulevard, Manassas, Va. 20110-2209 and assigned ATCC accession number PTA 4926 or ATCC accession number 55783. Both isolates are described in WO 96/39629 and WO 05/011731, respectively. The term “L. intracellularis” also means, but is not limited to any other L. intracellularis bacteria strain or isolate preferably having the immunogenic properties of at least one of the L. intracellularis strains described in WO 96/39629 and WO 05/011731, in particular having the immunogenic properties of at least one of the isolates deposited under the Budapest Treaty with the American Type Culture Collection, 10801 University Boulevard, Manassas, Va. 20110-2209 and assigned ATCC accession numbers PTA 4926 or ATCC accession number 55783.

[0023] Moreover, the term “L. intracellularis” also means any L. intracellularis antigen. The term “L. intracellularis antigen” as used herein means, but is not limited to any composition of matter, that comprises at least one antigen that can induce, stimulate or enhance the immune response against a L. intracellularis-caused infection, when administered to an animal, preferably a pig. Preferably, said L. intracellularis antigen is a complete L. intracellularis bacterium, in particular in an inactivated form (a so called killed bacterium), a modified live or attenuated L. intracellularis bacterium (a so called MLB), a chimeric vector that comprises at least an immunogenic amino acid sequence of L. intracellularis, or any other polypeptide or component, that comprises at least an immunogenic amino acid sequence of L. intracellularis. The terms “immunogenic protein”, “immunogenic polypeptide” or “immunogenic amino acid sequence” as used herein, refer to any amino acid sequence which elicits an immune response in a host against a pathogen comprising said immunogenic protein, immunogenic polypeptide or immunogenic amino acid sequence. In particular, an “immunogenic protein”, “immunogenic polypeptide” or “immunogenic amino acid sequence” of L. intracellularis means any amino acid sequence that codes for an antigen which elicits an immunological response against L. intracellularis in a host to which said “immunogenic protein”, “immunogenic polypeptide” or “immunogenic amino acid sequence” is administered. For example, the proteins having the sequences of SEQ ID Nos 1-455 and SEQ ID No 466, or any immunogenic portion thereof are considered to be an “immunogenic protein”, “immunogenic polypeptide” or “immunogenic amino acid sequence” of Lawsonia intracellularis. Furthermore, these terms include, but are not limited to the full-length sequence of any proteins, analogs thereof, or immunogenic fragments or portions thereof. The term “immunogenic fragment” or “immunogenic portion” means a fragment of a protein which includes one or more epitopes and thus elicits the immunological response against the relevant pathogen. Such fragments can be identified using any number of epitope mapping techniques that are well known in the art. See, e.g., Epitope Mapping Protocols in Methods in Molecular Biology, Vol. 66 (Glenn E. Morris, Ed., 1996) Humana Press, Totowa, N.J. (The teachings and content of which are incorporated by reference herein.) For example, linear epitopes may be determined by e.g., concurrently synthesizing large numbers of peptides on solid supports, the peptides corresponding to portions of the protein molecule, and reacting the peptides with antibodies while the peptides are still attached to the supports. Such techniques are known in the art and described in, e.g., U.S. Pat. No. 4,708,871; Geysen et al. (1984) Proc. Natl. Acad. Sci. USA 81:3998-4002; Geysen et al. (1986) Molec. Immunol. 23:709-715. (The teachings and content of which are incorporated by reference herein.) Similarly, conformational epitopes are readily identified by determining spatial conformation of amino acids such as by, e.g., x-ray crystallography and 2-dimensional nuclear magnetic resonance. See, e.g., Epitope Mapping Protocols, supra. Synthetic antigens are also included within the definition, for example, polyepitopes, flanking epitopes, and other recombinant or synthetically derived antigens. See, e.g., Bergmann et al. (1993) Eur. J. Immunol. 23:2777-2781; Bergmann et al. (1996), J. Immunol. 157:3242-3249; Suhrbier, A. (1997), Immunol. and Cell Biol. 75:402-408; Gardner et al., (1998) 12th World AIDS Conference, Geneva, Switzerland, Jun. 28-Jul. 3, 1998. (The teachings and content of which are incorporated by reference herein.)

[0024] A strain or isolate has the “immunogenic properties” of at least one of the L. intracellularis strains described in WO 96/39629 and WO 05/011731, in particular, of the isolates deposited as ATCC accession number PTA 4926 or ATCC accession number 55783, when it is detectable at least with one of the anti-L. intracellularis specific antibodies, described in WO06/01294, in a detection assay that is also described in WO06/01294. Preferably those antibodies are selected from the antibodies having the reference numbers 301:39, 287:6, 268:29, 110:9, 113:2 and 268:18. Preferably, the detection assay is a sandwich ELISA as described in Examples 2 and 3 of WO06/12949, whereas antibody 110:9 is used as an capture antibody and antibody 268:29 is used as conjugated antibody. All antibodies disclosed in WO06/12949 are produced by hybridoma cells, which are deposited at the Centre for Applied Microbiology and Research (CAMR) and European Collection of Cell Cultures (ECACC)”, Salisbury, Wiltshire SP4 0JG, UK, as a patent deposit according to the Budapest Treaty. The date of deposit was May 11, 2004. HYBRIDOMA CELL LINE 110:9 is successfully deposited under ECACC Acc. No. 04092204. HYBRIDOMA CELL LINE 113:2 is successfully deposited under ECACC Acc. No. 04092201. HYBRIDOMA CELL LINE 268:18 is successfully deposited under ECACC Acc. No. 04092202. HYBRIDOMA CELL LINE 268:29 is successfully deposited under ECACC Acc. No. 04092206. HYBRIDOMA CELL LINE 287:6 is successfully deposited under ECACC Acc. No. 04092203. HYBRIDOMA CELL LINE 301:39 is successfully deposited under ECACC Acc. No. 04092205.

[0025] Several of the sequences comprising the genome of Lawsonia intracellularis have been described in PCT applications WO0069903, WO0069904, WO0069905, and WO0069906 as well as European Patent 1094070, all of which have their teachings and contents incorporated by reference herein.

[0026] An “immunological response” or “immune response” to a composition or vaccine is the development in the host of a cellular and/or antibody-mediated immune response to the composition or vaccine of interest. Usually, an “immune response” includes but is not limited to one or more of the following effects: the production or activation of antibodies, B cells, helper T cells, suppressor T cells, and/or cytotoxic T cells and/or yd T cells, directed specifically to an antigen or antigens included in the composition or vaccine of interest. Preferably, the host will display either a therapeutic or protective immunological response such that resistance to new infection will be enhanced and/or the clinical severity of the disease reduced. Such protection will be demonstrated by either a reduction or lack of the symptoms associated with host infections as described above.

[0027] In addition, the immunogenic and vaccine compositions of the present invention can include one or more veterinary-acceptable carriers. As used herein, “a veterinary-acceptable carrier” includes any and all solvents, dispersion media, coatings, adjuvants, stabilizing agents, diluents, preservatives, antibacterial and antifungal agents, isotonic agents, adsorption delaying agents, and the like.

[0028] “Diluents” can include water, saline, dextrose, ethanol, glycerol, and the like. Isotonic agents can include sodium chloride, dextrose, mannitol, sorbitol, and lactose, among others. Stabilizers include albumin and alkali salts of ethylendiamintetracetic acid, among others.

[0029] “Adjuvants” as used herein, can include aluminum hydroxide and aluminum phosphate, saponins e.g., Quil A, QS-21 (Cambridge Biotech Inc., Cambridge Mass.), GPI-0100 (Galenica Pharmaceuticals, Inc., Birmingham, Ala.), water-in-oil emulsion, oil-in-water emulsion, water-in-oil-in-water emulsion. The emulsion can be based in particular on light liquid paraffin oil (European Pharmacopea type); isoprenoid oil such as squalane or squalene; oil resulting from theoligomerization of alkenes, in particular of isobutene or decene; esters of acids or of alcohols containing a linear alkyl group, more particularly plant oils, ethyl oleate, propylene glycol di-(caprylate/caprate), glyceryl tri-(caprylate/caprate) or propylene glycol dioleate; esters of branched fatty acids or alcohols, in particular isostearic acid esters. The oil is used in combination with emulsifiers to form the emulsion. The emulsifiers are preferably nonionic surfactants, in particular esters of sorbitan, of mannide (e.g. anhydromannitol oleate), of glycol, of polyglycerol, of propylene glycol and of oleic, isostearic, ricinoleic or hydroxystearic acid, which are optionally ethoxylated, and polyoxypropylene-polyoxyethylene copolymer blocks, in particular the Pluronic products, especially L121. See Hunter et al., The Theory and Practical Application of Adjuvants (Ed. Stewart-Tull, D. E. S.). John Wiley and Sons, NY, pp 51-94 (1995) and Todd et al., Vaccine 15:564-570 (1997). For example, it is possible to use the SPT emulsion described on page 147 of “Vaccine Design, The Subunit and Adjuvant Approach” edited by M. Powell and M. Newman, Plenum Press, 1995, and the emulsion MF59 described on page 183 of this same book.

[0030] A further instance of an adjuvant is a compound chosen from the polymers of acrylic or methacrylic acid and the copolymers of maleic anhydride and alkenyl derivative. Advantageous adjuvant compounds are the polymers of acrylic or methacrylic acid which are cross-linked, especially with polyalkenyl ethers of sugars or polyalcohols. These compounds are known by the term carbomer (Phameuropa Vol. 8, No. 2, June 1996). Persons skilled in the art can also refer to U.S. Pat. No. 2,909,462 which describes such acrylic polymers cross-linked with a polyhydroxylated compound having at least 3 hydroxyl groups, preferably not more than 8, the hydrogen atoms of at least three hydroxyls being replaced by unsaturated aliphatic radicals having at least 2 carbon atoms. The preferred radicals are those containing from 2 to 4 carbon atoms, e.g. vinyls, allyls and other ethylenically unsaturated groups. The unsaturated radicals may themselves contain other substituents, such as methyl. The products sold under the name Carbopol; (BF Goodrich, Ohio, USA) are particularly appropriate. They are cross-linked with an allyl sucrose or with allyl pentaerythritol. Among then, there may be mentioned Carbopol 974P, 934P and 971P. Most preferred is the use of Cabopol 971P. Among the copolymers of maleic anhydride and alkenyl derivative, the copolymers EMA (Monsanto) which are copolymers of maleic anhydride and ethylene. The dissolution of these polymers in water leads to an acid solution that will be neutralized, preferably to physiological pH, in order to give the adjuvant solution into which the immunogenic, immunological or vaccine composition itself will be incorporated.

[0031] Further suitable adjuvants include, but are not limited to, the RIBI adjuvant system (Ribi Inc.), Block co-polymer (CytRx, Atlanta Ga.), SAF-M (Chiron, Emeryville Calif.), monophosphoryl lipid A, Avridine lipid-amine adjuvant, heat-labile enterotoxin from E. coli (recombinant or otherwise), cholera toxin, IMS 1314 or muramyl dipeptide among many others.

[0032] Preferably, the adjuvant is added in an amount of about 100 μg to about 10 mg per dose. Even more preferred the adjuvant is added in an amount of about 100 μg to about 10 mg per dose. Even more preferred the adjuvant is added in an amount of about 500 μg to about 5 mg per dose. Even more preferred the adjuvant is added in an amount of about 750 μg to about 2.5 mg per dose. Most preferably, the adjuvant is added in an amount of about 1 mg per dose.

[0033] Owing to the degeneracy of the genetic code, it is known that several variations of nucleic acids may encode the same protein. As the encoding of amino acids and the genetic code are both well known in the art, all such variations in nucleic acid sequences that result in the same amino acid are covered by the present invention.

[0034] In one embodiment of the present invention, there is provided an immunological protein derived from Lawsonia intracellularis. It is herewith understood, that the terms “immunogenic and “immunological” are synonymously used herein. Preferably, the protein is selected from the group consisting of Lawsonia proteins. More preferably, the immunological protein is coded for by a DNA sequence coding for a protein having at least 85%, more preferably 90%, still more preferably 93%, even more preferably 95%, still more preferably 97%, even more preferably 98%, still more preferably 99% and most preferably 100% sequence homology with a sequence selected from the group consisting of SEQ ID Nos. 1-455 and 466 and combinations thereof. Alternatively, the protein is encoded for by a DNA sequence having at least about 85%, more preferably 90%, still more preferably 93%, even more preferably 95%, still more preferably 97%, even more preferably 98%, still more preferably 99% and most preferably 100% sequence homology with a sequence selected from the group consisting of SEQ ID No. 456 and SEQ ID No. 457. More preferably, the protein is selected from the group consisting of extracellular and outer membrane Lawsonia proteins. Still more preferably, the protein is selected from the group consisting of SEQ ID Nos. 355, 11, 378, 50, 35, 231, 4, 328, 313, 27, 172, 275, 387, 134, 201, 256, 2, 12, 404, 388, 327, 306, 415, 343, 373, 214, 330, 316, 428, 190, 129, 320, 381, 9, 292, 158, 270, 336, 423, 211, 178, 430, 77, 186, 264, 140, 193, 192, 208, 183, 108, 109, 87, 253, 379, 243, 364, 51, 99, 419, 278, 295, 349, 219, 127, 389, 254, 263, 294, 315, 257, 443, 403, 76, 75, 73, 344, 74, 238, 6, 329, 296, 413, 194, 143, 146, 333, 438, 188, 261, 237, 336, 291, 151, 26, 139, 333, 444, 308, 131, 284, 340, 466, and combinations thereof. Still more preferably, the protein is selected from the group consisting of SEQ ID Nos. 344, 466, and combinations thereof. It is furthermore understood that the reference to the sequences of SEQ ID NOS 1-455 as used herein, includes the reference to each individual sequence, which means for example to SEQ ID No 1, No. 2, No. 3, No. 4, No. 5, . . . , No. 450, No. 451, No. 452, No. 453, No. 454, and No. 455. More preferably, the immunological protein or combination of proteins reacts with convalescent swine serum in a Western blot. In another embodiment of the present invention, the immunological protein has a similar function and/or generates a similar immune response as a protein coded by either SEQ ID No. 456 or SEQ ID No. 457 or a protein selected from the group consisting of SEQ ID Nos. 1-455 and 466 (e.g. a “reference protein”). To “generate a similar immune response as a reference protein coded by either SEQ ID No. 456 or SEQ ID No. 457 or a protein selected from the group consisting of SEQ ID Nos. 1-455 and 466” as used herein, means that the immunological protein reacts in a standardized detection assay, e.g. an ELISA, with an amplitude of at least 20%, preferably 50%, even more preferred 75%, most preferred 100% as compared to the amplitude detected for the corresponding reference protein, when used in the detection assay under the same conditions. It being further understood that a combination of proteins may induce a greater immune response and thereby provide greater protective immunity than a single protein.

[0035] Another embodiment of the present invention provides an immunogenic protein or a vaccine composition comprising an amino acid sequence having at least 8 contiguous amino acids from a protein sequence as described above, homologs or immunogenic portions thereof, or homologs of said immunogenic portions. Still more preferably, the amino acid sequence which includes the required contiguous amino acids will be up to 8 amino acids in length, more preferably, up to 14 amino acids in length, still more preferably up to 23 amino acids in length, even more preferably, up to 40 amino acids in length, still more preferably, at least up to 70 amino acids in length, and still more preferably, up to 100 amino acids in length, still more preferably up to 200 amino acids in length, and even more preferably up to 300 amino acids in length. In preferred forms, the immunogenic or vaccine composition of the present invention will further comprise veterinary-acceptable carriers, as set forth above.

[0036] In another embodiment of the present invention, there is provided a method of vaccinating animals, preferably swine by inoculating them with an immunological protein derived from Lawsonia intracellularis. Preferably, the protein is as described above.

[0037] In another embodiment of the present invention, the vaccine comprises proteins selected from the group consisting of any one of SEQ ID Nos. 1-455 and 466, the protein encoded by SEQ ID No. 456, the protein encoded by SEQ ID No. 457, proteins that have similar functions and induce similar immune responses as any one of SEQ ID Nos. 1-455 and 466, or any portion thereof, proteins that have similar functions and induce similar immune responses to the protein encoded by SEQ ID No. 456, proteins that have similar functions and induce similar immune responses as the protein encoded by SEQ ID No. 457, immunogenic portions thereof, and combinations thereof.

[0038] In another embodiment of the present invention, the animals are vaccinated by inoculating them with a vaccine prepared by inserting DNA coding for an immunological protein derived from Lawsonia intracellularis into a vector and administering the vector through any conventional means. One preferred method of administration is oral. Preferably, the vector is a bacteria. More preferably, the vector is salmonella. Preferably, the protein is selected from the group consisting of Lawsonia proteins. More preferably, the protein coded for by the DNA is selected from the group consisting of SEQ ID Nos. 1-455 and 466, homologs thereof, immunogenic portions thereof, homologs of said immunogenic portions, proteins that have similar functions and induce similar immune responses as any one of SEQ ID Nos. 1-455 and 466, proteins that have similar functions and induce similar immune responses to the protein encoded by SEQ ID NO. 456, proteins that have similar functions and induce similar immune responses as the protein encoded by SEQ ID No. 457, and combinations thereof. More preferably, the immunological protein is coded for by a DNA sequence coding for a protein having at least 85%, more preferably 90%, still more preferably 93%, even more preferably 95%, still more preferably 97%, even more preferably 98%, still more preferably 99% and most preferably 100% sequence homology with a sequence selected from the group consisting of SEQ ID Nos. 1-455 and 466 and combinations thereof. Alternatively, the protein is encoded for by a DNA sequence having at least about 85%, more preferably 90%, still more preferably 93%, even more preferably 95%, still more preferably 97%, even more preferably 98%, still more preferably 99% and most preferably 100% sequence homology with a sequence selected from the group consisting of SEQ ID No. 456 and SEQ ID. No. 457, or a portion thereof coding for an immunogenic portion of the proteins encoded by the sequences of SEQ ID No. 456 and SEQ ID No. 457. More preferably, the protein is selected from the group consisting of extracellular and outer membrane Lawsonia proteins. Still more preferably, the protein is selected from the group consisting of SEQ ID Nos. 355, 11, 378, 50, 35, 231, 4, 328, 313, 27, 172, 275, 387, 134, 201, 256, 2, 12, 404, 388, 327, 306, 415, 343, 373, 214, 330, 316, 428, 190, 129, 320, 381, 9, 292, 158, 270, 336, 423, 211, 178, 430, 77, 186, 264, 140, 193, 192, 208, 183, 108, 109, 87, 253, 379, 243, 364, 51, 99, 419, 278, 295, 349, 219, 127, 389, 254, 263, 294, 315, 257, 443, 403, 76, 75, 73, 344, 74, 238, 6, 329, 296, 413, 194, 143, 146, 333, 438, 188, 261, 237, 336, 291, 151, 26, 139, 333, 444, 308, 131, 284, 340, 466, and combinations thereof. Still more preferably, the protein is selected from the group consisting of SEQ ID Nos. 344, 466, and combinations thereof. More preferably, the immunological protein or combination of proteins reacts with convalescent swine serum in a Western blot. In another embodiment of the present invention, the immunological protein has a similar function and/or generates a similar immune response as a protein coded by either SEQ ID No. 456 or SEQ ID No. 457 or a protein selected from the group consisting of SEQ ID Nos. 1-455 and 466, or a portion thereof, or a nucleotide sequence coding for an immunogenic portion of the proteins encoded by the sequences of SEQ ID No. 456 and SEQ ID No. 457, or portion thereof.

[0039] In another embodiment of the present invention, the DNA coding for an immunological protein derived from Lawsonia intracellularis is delivered to a desired host using a DNA vaccine. Preferably, the protein is selected from the group consisting of Lawsonia proteins. More preferably, the immunological protein is coded for by a DNA sequence coding for a protein having at least 85%, more preferably 90%, still more preferably 93%, even more preferably 95%, still more preferably 97%, even more preferably 98%, still more preferably 99% and most preferably 100% sequence homology with a sequence selected from the group consisting of SEQ ID Nos. 1-455 and 466, homologs thereof, immunogenic portions thereof, homologs of said immunogenic portions, proteins that have similar functions and induce similar immune responses as any one of SEQ ID Nos. 1-455 and 466, and combinations thereof. Alternatively, the protein is encoded for by a DNA sequence having at least about 85%, more preferably 90%, still more preferably 93%, even more preferably 95%, still more preferably 97%, even more preferably 98%, still more preferably 99% and most preferably 100% sequence homology with a sequence selected from the group consisting of SEQ ID No. 456 and SEQ ID No. 457, or a portion thereof coding for an immunogenic portion of the proteins encoded by the sequences of SEQ ID No. 456 and SEQ ID No. 457. More preferably, the protein is selected from the group consisting of extracellular and outer membrane Lawsonia proteins. Still more preferably, the protein is selected from the group consisting of SEQ ID Nos. 355, 11, 378, 50, 35, 231, 4, 328, 313, 27, 172, 275, 387, 134, 201, 256, 2, 12, 404, 388, 327, 306, 415, 343, 373, 214, 330, 316, 428, 190, 129, 320, 381, 9, 292, 158, 270, 336, 423, 211, 178, 430, 77, 186, 264, 140, 193, 192, 208, 183, 108, 109, 87, 253, 379, 243, 364, 51, 99, 419, 278, 295, 349, 219, 127, 389, 254, 263, 294, 315, 257, 443, 403, 76, 75, 73, 344, 74, 238, 6, 329, 296, 413, 194, 143, 146, 333, 438, 188, 261, 237, 336, 291, 151, 26, 139, 333, 444, 308, 131, 284, 340, 466, and combinations thereof. Still more preferably, the protein is selected from the group consisting of SEQ ID Nos. 344, 466, and combinations thereof. More preferably, the immunological protein or combination of proteins reacts with convalescent swine serum in a Western blot. In another embodiment of the present invention, the immunological protein has a similar function and/or generates a similar immune response as a protein coded by either SEQ ID No. 456 or SEQ ID No. 457 or a protein selected from the group consisting of SEQ ID Nos. 1-455 and 466.

[0040] In still another embodiment of the present invention, the DNA coding for an immunological protein derived from Lawsonia intracellularis could be expressed in a prokaryotic or eukaryotic system, then purified and delivered to the desired host. Preferably, the protein is selected from the group consisting of Lawsonia proteins. More preferably, the immunological protein is coded for by a DNA sequence coding for a protein having at least 85%, more preferably 90%, still more preferably 93%, even more preferably 95%, still more preferably 97%, even more preferably 98%, still more preferably 99% and most preferably 100% sequence homology with a sequence selected from the group consisting of SEQ ID Nos. 1-455 and 466 and combinations thereof. Alternatively, the protein is encoded for by a DNA sequence having at least about 85%, more preferably 90%, still more preferably 93%, even more preferably 95%, still more preferably 97%, even more preferably 98%, still more preferably 99% and most preferably 100% sequence homology with a sequence selected from the group consisting of SEQ ID No. 456 and SEQ ID No. 457. More preferably, the protein is selected from the group consisting of extracellular and outer membrane Lawsonia proteins. Still more preferably, the protein is selected from the group consisting of SEQ ID Nos. 355, 11, 378, 50, 35, 231, 4, 328, 313, 27, 172, 275, 387, 134, 201, 256, 2, 12, 404, 388, 327, 306, 415, 343, 373, 214, 330, 316, 428, 190, 129, 320, 381, 9, 292, 158, 270, 336, 423, 211, 178, 430, 77, 186, 264, 140, 193, 192, 208, 183, 108, 109, 87, 253, 379, 243, 364, 51, 99, 419, 278, 295, 349, 219, 127, 389, 254, 263, 294, 315, 257, 443, 403, 76, 75, 73, 344, 74, 238, 6, 329, 296, 413, 194, 143, 146, 333, 438, 188, 261, 237, 336, 291, 151, 26, 139, 333, 444, 308, 131, 284, 340, 466, and combinations thereof. Still more preferably, the protein is selected from the group consisting of SEQ ID Nos. 344, 466, and combinations thereof. More preferably, the immunological protein or combination of proteins reacts with convalescent swine serum in a Western blot. In another embodiment of the present invention, the immunological protein has a similar function and/or generates a similar immune response as a protein coded by either SEQ ID No. 456 or SEQ ID No. 457 or a protein selected from the group consisting of SEQ ID Nos. 1-455 and 466.

[0041] Additionally, other vaccination methods known in the art such as IM injection, biodegradable microspheres, or inhalation, among others, may be used for the delivery of an immunological protein in accordance with the present invention.

[0042] Thus, the present invention relates to an immunological or immunogenic protein, preferably of Lawsonia intracellularis that is selected from the group of:
[0043] 1) a polypeptide comprising a sequence selected from the group consisting of SEQ ID Nos.: 1-455, SEQ ID No 466, or the polypeptide encoded by SEQ ID No: 456, SEQ ID No: 457 or SEQ ID No: 466;
[0044] 2) any polypeptide that has at least 85% sequence homology, more preferably at least about 90% sequence homology, still more preferably at least about 95% sequence homology, even more preferably at least about 97% sequence homology, still even more preferably at least about 98% sequence homology, and even more preferably at least about 99% sequence homology to the polypeptide of 1);
[0045] 3) any immunogenic portion of the polypeptides of 1) and/or 2)
[0046] 4) the immunogenic portion of 3), comprising at least 300, 290, 280, 270, 260, 250, 240, 230, 220, 210, 200, 190, 180, 170, 160, 150, 140, 130, 120, 110, 100, 90, 80, 70, 60, 50, 45, 40, 35, 30, 25, 20, 18, 15, 13, 10, 9, or most preferably 8 contiguous amino acids included in the sequences of SEQ ID No: 1-455, SEQ ID. No: 456, or the amino acid sequence encoded by SEQ ID No: 457 or SEQ ID No: 466; and/or
[0047] 5) a polypeptide that is encoded by a DNA that codes for a peptide comprising the sequence of SEQ ID No: 1-455 or SEQ ID No: 466.

[0048] The immunogenic proteins described herein can be obtained from Lawsonia intracellularis by isolation and/or purification, or can be obtained from in vitro recombinant expression of the nucleic acid(s), coding for the immunogen(s) or portions or epitopes thereof. Methods for the isolation and/or purification of known proteins are well known to a person skilled in the art. Moreover, several methods are known in the art to recombinantly express a protein of a known sequence.

[0049] A further aspect of the present invention relates to a DNA molecule that includes a nucleotide sequence, that encodes for at least one of the immunological proteins described above. Preferably, that DNA molecule includes a nucleotide sequence which encodes for at least one immunological protein selected from the group consisting of:
[0050] 1) a polypeptide comprising a sequence selected from the group consisting of SEQ ID Nos.: 1-455, SEQ ID No 466, or the polypeptide encoded by SEQ ID No: 456, SEQ ID No: 457 or SEQ ID No: 466;
[0051] 2) any polypeptide that has at least 85% sequence homology, more preferably at least about 90% sequence homology, still more preferably at least about 95% sequence homology, even more preferably at least about 97% sequence homology, still even more preferably at least about 98% sequence homology, and even more preferably at least about 99% sequence homology to the polypeptide of 1);
[0052] 3) any immunogenic portion of the polypeptides of 1) and/or 2); and/or
[0053] 4) the immunogenic portion of 3), comprising at least 300, 290, 280, 270, 260, 250, 240, 230, 220, 210, 200, 190, 180, 170, 160, 150, 140, 130, 120, 110, 100, 90, 80, 70, 60, 50, 45, 40, 35, 30, 25, 20, 18, 15, 13, 10, 9, or most preferably 8 contiguous amino acids included in the sequences of SEQ ID No: 1-455, SEQ ID No: 456, or the amino acid sequence encoded by SEQ ID No: 457 or SEQ ID No: 466.

[0054] In still another embodiment of the present invention, the DNA coding for an immunological protein derived from Lawsonia intracellularis is expressed in a prokaryotic or eukaryotic system, then purified and delivered to the desired host. Preferably, the protein is selected from the group consisting of:
[0055] 1) a polypeptide comprising a sequence selected from the group consisting of SEQ ID Nos.: 1-455, SEQ ID No 466, or the polypeptide encoded by SEQ ID No: 456, SEQ ID No: 457 or SEQ ID No: 466;
[0056] 2) any polypeptide that has at least 85% sequence homology, more preferably at least about 90% sequence homology, still more preferably at least about 95% sequence homology, even more preferably at least about 0.97% sequence homology, still even more preferably at least about 98% sequence homology, and even more preferably at least about 99% sequence homology to the polypeptide of 1);
[0057] 3) any immunogenic portion of the polypeptides of 1) and/or 2); and/or
[0058] 4) the immunogenic portion of 3), comprising at least 300, 290, 280, 270, 260, 250, 240, 230, 220, 210, 200, 190, 180, 170, 160, 150, 140, 130, 120, 110, 100, 90, 80, 70, 60, 50, 45, 40, 35, 30, 25, 20, 18, 15, 13, 10, or most preferably 9 contiguous amino acids included in the sequences of SEQ ID No: 1-455, SEQ ID No: 456, or the amino acid sequence encoded by SEQ ID No: 457 or SEQ ID No: 466.

[0059] According to a further aspect, the present invention also relates to a vector comprising any of the DNA molecules described herein. Preferably, that DNA molecule includes a nucleotide sequence which encodes for at least one immunological protein selected from the group consisting of:
[0060] 1) a polypeptide comprising a sequence selected from the group consisting of SEQ ID Nos.: 1-455, SEQ ID No 466, or the polypeptide encoded by SEQ ID No: 456, SEQ ID No: 457 or SEQ ID No: 466;
[0061] 2) any polypeptide that has at least 85% sequence homology, more preferably at least about 90% sequence homology, still more preferably at least about 95% sequence homology, even more preferably at least about 97% sequence homology, still even more preferably at least about 98% sequence homology, and even more preferably at least about 99% sequence homology to the polypeptide of 1);
[0062] 3) any immunogenic portion of the polypeptides of 1) and/or 2); and/or 4) the immunogenic portion of 3), comprising at least 300, 290, 280, 270, 260, 250, 240, 230, 220, 210, 200, 190, 180, 170, 160, 150, 140, 130, 120, 110, 100, 90, 80, 70, 60, 50, 45, 40, 35, 30, 25, 20, 18, 15, 13, 10, or most preferably 9 contiguous amino acids included in the sequences of SEQ ID No: 1-455, SEQ ID No: 456, or the amino acid sequence encoded by SEQ ID No: 457 or SEQ ID No: 466.

[0063] Methods for making and/or using vectors (or recombinants) for expression can be by or analogous to the methods disclosed in: U.S. Pat. Nos. 4,603,112, 4,769,330, 5,174,993, 5,505,941, 5,338,683, 5,494,807, 4,722,848, 5,942,235, 5,364,773, 5,762,938, 5,770,212, 5,942,235, 382,425, PCT publications WO 94/16716, WO 96/39491, WO 95/30018, Paoletti, “Applications of pox virus vectors to vaccination: An update,” PNAS USA 93: 11349-11353, October 1996, Moss, “Genetically engineered poxviruses for recombinant gene expression, vaccination, and safety,” PNAS USA 93: 11341-11348, October 1996, Smith et al., U.S. Pat. No. 4,745,051, (recombinant baculovirus), Richardson, C. D. (Editor), Methods in Molecular Biology 39, “Baculovirus Expression Protocols” (1995 Humana Press Inc.), Smith et al., “Production of Huma Beta Interferon in Insect Cells Infected with a Baculovirus Expression Vector”, Molecular and Cellular Biology, December, 1983, Vol. 3, No. 12, p. 2156-2165; Pennock et al., “Strong and Regulated Expression of Escherichia coli B-Galactosidase in Infect Cells with a Baculovirus vector,” Molecular and Cellular Biology March 1984, Vol. 4, No. 3, p. 399-406; EPA0 370 573, U.S. application No. 920,197, filed Oct. 16, 1986, EP Patent publication No. 265785, U.S. Pat. No. 4,769,331 (recombinant herpesvirus), Roizman, “The function of herpes simplex virus genes: A primer for genetic engineering of novel vectors,” PNAS USA 93:11307-11312, October 1996, Andreansky et al., “The application of genetically engineered herpes simplex viruses to the treatment of experimental brain tumors,” PNAS USA 93: 11313-11318, October 1996, Robertson et al. “Epstein-Barr virus vectors for gene delivery to B lymphocytes”, PNAS USA 93: 11334-11340, October 1996, Frolov et al., “Alphavirus-based expression vectors: Strategies and applications,” PNAS USA 93: 11371-11377, October 1996, Kitson et al., J. Virol. 65,3068-3075, 1991; U.S. Pat. Nos. 5,591,439, 5,552,143, WO 98/00166, allowed U.S. application Ser. Nos. 08/675,556, and 08/675,566 both filed Jul. 3, 1996 (recombinant adenovirus), Grunhaus et al., 1992, “Adenovirus as cloning vectors,” Seminars in Virology (Vol. 3) p. 237-52, 1993, Ballay et al. EMBO Journal, vol. 4, p. 3861-65, Graham, Tibtech 8, 85-87, April, 1990, Prevec et al., J. Gen Virol. 70, 42434, PCT WO 91/11525, Felgner et al. (1994), J. Biol. Chem. 269, 2550-2561, Science, 259:1745-49, 1993 and McClements et al., “Immunization with DNA vaccines encoding glycoprotein D or glycoprotein B, alone or in combination, induces protective immunity in animal models of herpes simplex virus-2 disease”, PNAS USA 93: 11414-11420, October 1996, and U.S. Pat. Nos. 5,591,639, 5,589,466, and 5,580,859, as well as WO 90/11092, WO93/19183, WO94/21797, WO95/11307, WO95/20660, Tang et al., Nature and Furth et al. Analytical Biochemistry, relating to DNA expression vectors, inter alia. See also WO 98/33510; Ju et al., Diabetologia, 41: 736-739, 1998 (lentiviral expression system); Sanford et al., U.S. Pat. No. 4,945,050; Fischbach et al. (Intracel), WO 90/01543; Robinson et al., seminars in Immunology vol. 9, pp. 271-283 (1997), (DNA vector systems); Szoka et al., U.S. patent No. (method of inserting DNA into living cells); McCormick et al., U.S. Pat. No. 5,677,178 (use of cytopathic viruses); and U.S. Pat. No. 5,928,913 (vectors for gene delivery), as well as other documents cited herein. A viral vector, for instance, selected from pig herpes viruses, such as Aujeszky's disease virus, porcine adenovirus, poxviruses, especially vaccinia virus, avipox virus, canarypox virus, and swinepox virus, as well as DNA vectors (DNA plasmids) are advantageously employed in the practice of the invention.

[0064] According to a further aspect the present invention relates to an immunological composition, preferably a vaccine composition, effective for lessening the severity of clinical symptoms associated with a Lawsonia intracellularis infection. Preferably, that immunological composition comprises an immunological protein, a DNA molecule coding for an immunological protein, and/or a vector including a DNA coding for an immunological protein as disclosed herein. Preferably, said immunological protein is:
[0065] 1) a polypeptide comprising a sequence selected from the group consisting of SEQ ID Nos.: 1-455, SEQ ID No 466, or the polypeptide encoded by SEQ ID No: 456, SEQ ID No: 457 or SEQ ID No: 466;
[0066] 2) any polypeptide that has at least 85% sequence homology, more preferably at least about 90% sequence homology, still more preferably at least about 95% sequence homology, even more preferably at least about 97% sequence homology, still even more preferably at least about 98% sequence homology, and even more preferably at least about 99% sequence homology to the polypeptide of 1);
[0067] 3) any immunogenic portion of the polypeptides of 1) and/or 2)
[0068] 4) the immunogenic portion of 3), comprising at least 300, 290, 280, 270, 260, 250, 240, 230, 220, 210, 200, 190, 180, 170, 160, 150, 140, 130, 120, 110, 100, 90, 80, 70, 60, 50, 45, 40, 35, 30, 25, 20, 18, 15, 13, 10, or most preferably 9 contiguous amino acids included in the sequences of SEQ ID No: 1-455, SEQ ID No: 456, or the amino acid sequence encoded by SEQ ID No: 457 or SEQ ID No: 466; and/or
[0069] 5) a polypeptide that is encoded by a DNA that codes for a peptide comprising the sequence of SEQ ID No: 1-455 or SEQ ID No: 466.

[0070] The immunogenic and vaccine compositions of the present invention can include diluents, isotonic agents, stabilizers, and/or adjuvants, preferably selected from those which are disclosed herein.

[0071] Thus, according to a further aspect, the present invention relates to a immunological composition, that comprises an immunological protein, an DNA molecule coding for an immunological protein, and/or an vector including a DNA coding for an immunological protein described herein and a diluents, isotonic agents, stabilizers, or adjuvants. Preferably, said immunological protein is:
[0072] 1) a polypeptide comprising a sequence selected from the group consisting of SEQ ID Nos.: 1-455, SEQ ID No 466, or the polypeptide encoded by SEQ ID No: 456, SEQ ID No: 457 or SEQ ID No: 466;
[0073] 2) any polypeptide that has at least 85% sequence homology, more preferably at least about 90% sequence homology, still more preferably at least about 95% sequence homology, even more preferably at least about 97% sequence homology, still even more preferably at least about 98% sequence homology, and even more preferably at least about 99% sequence homology to the polypeptide of 1);
[0074] 3) any immunogenic portion of the polypeptides of 1) and/or 2)
[0075] 4) the immunogenic portion of 3), comprising at least 300, 29.0, 280, 270, 260, 250, 240, 230, 220, 210, 200, 190, 180, 170, 160, 150, 140, 130, 120, 110, 100, 90, 80, 70, 60, 50, 45, 40, 35, 30, 25, 20, 18, 15, 13, 10, or most preferably 9 contiguous amino acids included in the sequences of SEQ ID No: 1-455, SEQ ID No: 456, or the amino acid sequence encoded by SEQ ID No: 457 or SEQ ID No: 466; and/or
[0076] 5) a polypeptide that is encoded by a DNA that codes for a peptide comprising the sequence of SEQ ID No: 1-455 or SEQ ID No: 466.

[0077] Preferably said diluent, isotonic agent, stabilizer, or adjuvant is anyone of those described above.

[0078] In another embodiment of the present invention, there is provided a method for the prevention or treatment of an animal against Lawsonia intracellularis infections by inoculating said animal with an immunological protein derived from Lawsonia intracellularis. Preferably, the protein or immunological composition is anyone of those described above. Preferably, said immunological protein is:
[0079] 1) a polypeptide comprising a sequence selected from the group consisting of SEQ ID Nos.: 1-455, SEQ ID No 466, or the polypeptide encoded by SEQ ID No: 456, SEQ ID No: 457 or SEQ ID No: 466;
[0080] 2) any polypeptide that has at least 85% sequence homology, more preferably at least about 90% sequence homology, still more preferably at least about 95% sequence homology, even more preferably at least about 97% sequence homology, still even more preferably at least about 98% sequence homology, and even more preferably at least about 99% sequence homology to the polypeptide of 1);
[0081] 3) any immunogenic portion of the polypeptides of 1) and/or 2)
[0082] 4) the immunogenic portion of 3), comprising at least 300, 290, 280, 270, 260, 250, 240, 230, 220, 210, 200, 190, 180, 170, 160, 150, 140, 130, 120, 110, 100, 90, 80, 70, 60, 50, 45, 40, 35, 30, 25, 20, 18, 15, 13, 10, or most preferably 9 contiguous amino acids included in the sequences of SEQ ID No: 1-455, SEQ ID No: 456, or the amino acid sequence encoded by SEQ ID No: 457 or SEQ ID No: 466; and/or
[0083] 5) a polypeptide that is encoded by a DNA that codes for a peptide comprising the sequence of SEQ ID No: 1-455 or SEQ ID No: 466.

[0084] In another embodiment of the present invention, the animal is vaccinated by inoculating it with a vaccine prepared by inserting DNA coding for an immunological protein derived from Lawsonia intracellularis into a vector and administering the vector through any conventional means. One preferred method of administration is oral. Preferably, the vector is a bacteria. More preferably, the vector is salmonella. Preferably, the DNA codes for a protein selected from the group consisting of:
[0085] 1) a polypeptide comprising a sequence selected from the group consisting of SEQ ID Nos.: 1-455, SEQ ID No 466, or the polypeptide encoded by SEQ ID No: 456, SEQ ID No: 457 or SEQ ID No: 466;
[0086] 2) any polypeptide that has at least 85% sequence homology, more preferably at least about 90% sequence homology, still more preferably at least about 95% sequence homology, even more preferably at least about 97% sequence homology, still even more preferably at least about 98% sequence homology, and even more preferably at least about 99% sequence homology to the polypeptide of 1);
[0087] 3) any immunogenic portion of the polypeptides of 1) and/or 2)
[0088] 4) the immunogenic portion of 3), comprising at least 300, 290, 280, 270, 260, 250, 240, 230, 220, 210, 200, 190, 180, 170, 160, 150, 140, 130, 120, 110, 100, 90, 80, 70, 60, 50, 45, 40, 35, 30, 25, 20, 18, 15, 13, 10, or most preferably 9 contiguous amino acids included in the sequences of SEQ ID No: 1-455, SEQ ID No: 456, or the amino acid sequence encoded by SEQ ID No: 457 or SEQ ID No: 466; and/or
[0089] 5) a polypeptide that is encoded by a DNA that codes for a peptide comprising the sequence of SEQ ID No: 1-455 or SEQ ID No: 466.

[0090] More preferably, the immunological protein or combination of proteins coded by said DNA molecule reacts with convalescent swine serum in a Western blot.

[0091] In another embodiment of the present invention, the DNA molecule coding for an immunological protein derived from Lawsonia intracellularis is delivered to a desired host using a DNA vaccine. Preferably, the DNA molecule expresses the immunological protein, when it has entered a host cell. Preferably, the immunological protein encoded by the DNA molecule is selected from the group consisting of:
[0092] 1) a polypeptide comprising a sequence selected from the group consisting of SEQ ID Nos.: 1-455, SEQ ID No 466, or the polypeptide encoded by SEQ ID No: 456, SEQ ID No: 457 or SEQ ID No: 466;
[0093] 2) any polypeptide that has at least 85% sequence homology, more preferably at least about 90% sequence homology, still more preferably at least about 95% sequence homology, even more preferably at least about 97% sequence homology, still even more preferably at least about 98% sequence homology, and even more preferably at least about 99% sequence homology to the polypeptide of 1);
[0094] 3) any immunogenic portion of the polypeptides of 1) and/or 2); and/or
[0095] 4) the immunogenic portion of 3), comprising at least 300, 290, 280, 270, 260, 250, 240, 230, 220, 210, 200, 190, 180, 170, 160, 150, 140, 130, 120, 110, 100, 90, 80, 70, 60, 50, 45, 40, 35, 30, 25, 20, 18, 15, 13, 10, or most preferably 9 contiguous amino acids included in the sequences of SEQ ID No: 1-455, SEQ ID No: 456, or the amino acid sequence encoded by SEQ ID No: 457 or SEQ ID No: 466.

[0096] More preferably, the immunological protein or combination of proteins reacts with convalescent swine serum in a Western blot.

[0097] The vaccine compositions of the present invention, as disclosed herein, can further include one or more other immunomodulatory agents such as, e.g., interleukins, interferons, or other cytokines. The vaccine compositions can also include Gentamicin and Merthiolate. While the amounts and concentrations of adjuvants and additives useful in the context of the present invention can readily be determined by the skilled artisan, the present invention contemplates compositions comprising from about 50 ug to about 2000 ug of adjuvant and preferably about 250 ug/ml dose of the vaccine composition. In another preferred embodiment, the present invention contemplates vaccine compositions comprising from about 1 ug/ml to about 60 ug/ml of antibiotics and/or immunomodulatory agents, and more preferably less than about 30 ug/ml of antibiotics and/or immunomodulatory agents.

[0098] According to a further embodiment, vaccine compositions in accordance with the present invention can first be dehydrated. If the composition is first lyophilized or dehydrated by other methods, then, prior to vaccination, said composition is rehydrated in aqueous (e.g. saline, PBS (phosphate buffered saline)) or non-aqueous solutions (e.g. oil emulsion (mineral oil, or vegetable/metabolizable oil based/single or double emulsion based), aluminum-based, carbomer based adjuvant).

[0099] Vaccine or immunogenic compositions according to the invention may be administered intramuscularly, intranasally, orally, intradermally, intratracheally, or intravaginally. Preferably, the composition is administered intramuscularly, orally, or intranasally. In an animal body, it can prove advantageous to apply the compositions as described above via an intravenous injection or by direct injection into target tissues. For systemic application, the intravenous, intravascular, intramuscular, intranasal, intraarterial, intraperitoneal, oral, or intrathecal routes are preferred. A more local application can be effected subcutaneously, intradermally, intracutaneously, intracardially, intralobally, intramedullarly, intrapulmonarily or directly in or near the tissue to be treated (connective-, bone-, muscle-, nerve-, epithelial tissue). Depending on the desired duration and effectiveness of the treatment, the compositions according to the invention may be administered once or several times, also intermittently, for instance on a daily basis for several days, weeks or months and in different dosages.

[0100] Another aspect of the present invention provides a diagnostic/detection assay utilizing proteins in accordance with the invention. Preferably, that diagnostic/detection assay is specific for the detection of antibodies in a sample which specifically reacts with antigen of Lawsonia intracellularis. Preferably, that diagnostic/detection assay is specific for the detection of antibodies in a sample, wherein those antibodies are generated in cause of a Lawsonia intracellularis infection. Preferably, the protein is selected from the group consisting of:
[0101] 1) a polypeptide comprising a sequence selected from the group consisting of SEQ ID Nos.: 1-455, SEQ ID No 466, or the polypeptide encoded by SEQ ID No: 456, SEQ ID No: 457 or SEQ ID No: 466;
[0102] 2) any polypeptide that has at least 85% sequence homology, more preferably at least about 90% sequence homology, still more preferably at least about 95% sequence homology, even more preferably at least about 97% sequence homology, still even more preferably at least about 98% sequence homology, and even more preferably at least about 99% sequence homology to the polypeptide of 1);
[0103] 3) any immunogenic portion of the polypeptides of 1) and/or 2);
[0104] 4) the immunogenic portion of 3), comprising at least 300, 290, 280, 270, 260, 250, 240, 230, 220, 210, 200, 190, 180, 170, 160, 150, 140, 130, 120, 110, 100, 90, 80, 70, 60, 50, 45, 40, 35, 30, 25, 20, 18, 15, 13, 10, or most preferably 9 contiguous amino acids included in the sequences of SEQ ID No: 1-455, SEQ ID No: 456, or the amino acid sequence encoded by SEQ ID No: 457 or SEQ ID No: 466; and/or
[0105] 5) a polypeptide that is encoded by a DNA that codes for a peptide comprising the sequence of SEQ ID No: 1-455 or SEQ ID No: 466.

[0106] Such proteins could be used in an ELISA-based test. Such a protein could also be injected into an animal (e.g. a rabbit) to create an antiserum useful for detecting antibody or, antigen. Such assays would be useful in confirming or ruling out Lawsonia infection.

[0107] Preferably the detection assay, preferably the ELISA-based test, comprises the steps:
[0108] 1) contacting a sample comprising antibodies against Lawsonia intracellularis bacteria with an immunogenic protein of Lawsonia as described herein;
[0109] 2) incubating the mixture of 1) under conditions which allow the immunogenic protein of Lawsonia to bind to the Lawsonia specific antibodies of the sample and to generate a complex of Lawsonia specific antibody and the immunogenic protein; and
[0110] 3) Detecting the presence of the complex of 2).

[0111] Another aspect of the present invention relates to a kit in parts, comprising an protein selected from the group consisting of:
[0112] 1) a polypeptide comprising a sequence selected from the group consisting of SEQ ID Nos: 1-455, SEQ ID No 466, or the polypeptide encoded by SEQ ID No: 456, SEQ ID No: 457 or SEQ ID No: 466;
[0113] 2) any polypeptide that has at least 85% sequence homology, more preferably at least about 90% sequence homology, still more preferably at least about 95% sequence homology, even more preferably at least about 97% sequence homology, still even more preferably at least about 98% sequence homology, and even more preferably at least about 99% sequence homology to the polypeptide of 1);
[0114] 3) any immunogenic portion of the polypeptides of 1) and/or 2)
[0115] 4) the immunogenic portion of 3), comprising at least 300, 290, 280, 270, 260, 250, 240, 230, 220, 210, 200, 190, 180, 170, 160, 150, 140, 130, 120, 110, 100, 90, 80, 70, 60, 50, 45, 40, 35, 30, 25, 20, 18, 15, 13, 10, or most preferably 9 contiguous amino acids included in the sequences of SEQ ID No: 1-455, SEQ ID No: 456, or the amino acid sequence encoded by SEQ ID No: 457 or SEQ ID No: 466; and/or
[0116] 5) a polypeptide that is encoded by a DNA that codes for a peptide comprising the sequence of SEQ ID No: 1-455 or SEQ ID No: 466.

[0117] Preferably that kit in parts is a detection kit for the detection of antibodies in a sample which specifically react with antigen of Lawsonia intracellularis. Preferably, that detection kit is specific for the detection of antibodies in a sample, wherein those antibodies are generated in cause of a Lawsonia intracellularis infection.

[0118] Another aspect of the present invention provides an expression system for expressing proteins useful for purposes of the present invention. Those of skill in the art are familiar with such expression systems. A preferred expression system in this regard will utilize E. coli or recombinant baculovirus to express or generate recombinant proteins. Preferably, the E. coli or baculovirus will have nucleic acid sequences inserted therein which encode for proteins, as described above. It is noted that the examples of expression systems are mentioned above in an exemplarily manner.

[0119] In another aspect of the present invention, fusion proteins and chimeras are provided. Preferably, the fusion proteins or chimera present or expressed will comprise any one of:
[0120] 1) a polypeptide comprising a sequence selected from the group consisting of SEQ ID Nos.: 1-455, SEQ ID No 466, or the polypeptide encoded by SEQ ID No: 456, SEQ ID No: 457 or SEQ ID No: 466;
[0121] 2) any polypeptide that has at least 85% sequence homology, more preferably at least about 90% sequence homology, still more preferably at least about 95% sequence homology, even more preferably at least about 97% sequence homology, still even more preferably at least about 98% sequence homology, and even more preferably at least about 99% sequence homology to the polypeptide of 1);
[0122] 3) any immunogenic portion of the polypeptides of 1) and/or 2);
[0123] 4) the immunogenic portion of 3), comprising at least 300, 290, 280, 270, 260, 250, 240, 230, 220, 210, 200, 190, 180, 170, 160, 150, 140, 130, 120, 110, 100, 90, 80, 70, 60, 50, 45, 40, 35, 30, 25, 20, 18, 15, 13, 10, or most preferably 9 contiguous amino acids included in the sequences of SEQ ID No: 1-455, SEQ ID No: 456, or the amino acid sequence encoded by SEQ ID No: 457 or SEQ ID No: 466; and/or
[0124] 5) a polypeptide that is encoded by a DNA that codes for a peptide comprising the sequence of SEQ ID No: 1-455 or SEQ ID No: 466.

### BRIEF DESCRIPTION OF TH E DRAWING FIGURES

[0125] FIG. 1 is a Coomasie stained Gel picture illustrating the expression of the Omp85-like protein;

[0126] FIG. 2 is picture of the IMAC fractions of E. coli (pET HlyA);

[0127] FIG. 3 is a gel picture of the HlyA and Omp85-like proteins;

[0128] FIGS. 4A-C are Western Blot pictures showing reactivity to the HlyA and Omp85-like proteins of the present invention;

[0129] FIG. 5 provides the results of a BLAST search showing the homologous data for the 456 Lawsonia proteins; and

[0130] FIG. 6 is a listing of the 456 Lawsonia proteins, with the first 6 proteins being preceded by the protein name and being SEQ ID Nos. 1-6, respectively, and the remaining 450 proteins being preceded by their corresponding SEQ ID No.

### DETAILED DESCRIPTION OF THE PREFERRED EMBODIMENTS

[0131] The following examples set forth preferred materials and procedures in accordance with the present invention. It is to be understood, however, that these examples are provided by way of illustration only, and nothing therein should be deemed a limitation upon the overall scope of the invention.

### EXAMPLE 1

[0132] This example demonstrates the immunological detection of the Lawsonia intracellularis DK15540 hemolysin A (HlyA) and Omp85 proteins expressed as prokaryotic fusion proteins.

[0133] Materials and Methods

[0134] Transforming E. coli Strains

[0135] To begin, McCoy cell DNA was removed from a Lawsonia intracellularis (“Lawsonia”) cell pellet. This was done by first propagating the DK15540 strain of Lawsonia in a McCoy cell suspension culture. The Lawsonia infected McCoy cells were then pelleted by centrifugation at 10,000 rpm for 30 minutes at 4° C. using a JA-17 rotor (Beckman Coulter, Fullerton, Calif.). The supernatant was removed and the pelleted cells were then disrupted by repeated passage through a 22G double-hub emulsifying needle using two syringes. The disrupted cell mixture was then mixed with 35 mL of a Percoll/NaCl solution. The resulting solution was then centrifuged at 14,000 rpm for 45 minutes at 4° C. After centrifugation, the upper layer of debris was removed with a pipette and the bacterial band was recovered. This bacterial band was then centrifuged at 14,000 rpm for 15 minutes. The resulting Lawsonia pellet was then washed three times by resuspending the pellet in 35 mL of PBS. The resulting suspension was then centrifuged at 14,000 rpm for 15 minutes. The supernatant was discarded and the pellet was resuspended in 3 mL of PBS. Next, 30 μL of 1M MgSO₄ and 30 μL of DNase A was added to the suspension. The resulting mixture was then incubated at 37° C. for 2 hours. The mixture was then diluted to 35 mL with Percoll/NaCl and centrifuged as above (14,000 rpm for 15 minutes at 4° C.). The resulting pellet was washed three times in PBS and then stored overnight at 4° C.

[0136] To extract genomic DNA from the Lawsonia cell pellet, the pellet was resuspended in 3.5 mL of buffer B1 from the Qiagen Genomic DNA Kit (Qiagen, Valencia, Calif.) after the overnight storage. Next, 10 μL RNase A (5 μg/μL), 80 μL of lysozyme solution (100 mg/ml) and 100 μL Proteinase K (20 mg/ml). The resulting mixture was incubated at 37° C. for 1 hour and 1.2 mL of Buffer B2 from the Qiagen Genomic DNA kit was added to it. The resulting solution was then gently mixed by inversion. Following the mixing, the solution was then incubated at 50° C. for 30 minutes. While the solution was being incubated, a genomic-tip 500G (from the Qiagen Genomic DNA Kit) was equilibrated with 10 mL of QBT buffer. After incubation, the resulting solution was vortexed for 10 seconds at maximum speed (14,000 rpm) and applied to the pre-equilibrated tip. After the entire solution had entered the tip, it was washed twice with 30 mL of Buffer QC, and the DNA was eluted with 15 mL of Buffer QF. To the eluted DNA was added 10.5 mL of isopropanol, and the tubes were then mixed by gentle inversion. The resulting mixture was then dispensed into separate 1.5 mL microfuge tubes and centrifuged at 14,000 rpm for 15 minutes. The resulting supernatants were then decanted and the pellets rinsed with 0.5 ml of 70% ethanol. The tubes were centrifuged, the supernatants decanted again, and the pellets briefly dried. 12.5 μL of TE buffer was then added to each tube. The tubes were then incubated overnight at 37° C. with gentle shaking. The solutions were then pooled into a single tube, incubated at 55° C. for 2 hours and then quantified by UV spectroscopy.

[0137] Next, PCR was performed on the Lawsonia genes and genomic sequence analysis, including BLAST search data, was then used to identify two genes of interest: Omp85 (SEQ ID No. 456) and HlyA (SEQ ID No. 457). The resulting DNA sequence data was used to determine the potential open reading frames (“ORFs”) for each gene and PCR primers were designed which would correspond to the 5′ and 3′ ends of the desired gene with the additional ligation independent cloning (“LIC”) overhang added to the 5′ end of each respective primer (SEQ ID Nos. 458 GGTATTGAGGGTCGCATGACAAAACGCCTGAATATATT and 459 AGAGGAGAGTTAGAGCCTTATTAGAAGAATTGCCCCA for the LIMOP85 primers for pET-32Xa/LIC and SEQ ID Nos. 460 GGTATTGAGGGTCGCATGGCCAAACATAAAGTACGTGC and 461 AGAGGAGAGTTAGAGCCTTATTAACGTTTTTTCAAGTAAA, respectively, for the Hemolysin primers in pET-32Xa.LIC vector). For each of these primers, the underlined portion represents the primer specific sequences required for the LIC process. These sequences are also provided herein as SEQ ID Nos. 462, 463, 464, and 465, respectively. PCR was then carried out using the Lawsonia DK15540 genomic DNA as a template.

[0138] For the HlyA PCR cycle, the PCR reaction was heated to 95° C. for 5 minutes. The reaction then proceeded to 35 cycles of 95° C. for 1 minute, 55° C. for 1 minute, and 72° C. for 1 minute. The PCR cycle was completed following a final cycle of 72° C. for 10 minutes.

[0139] For the Omp85 PCR cycle, the PCR reaction was heated to 95° C. for 5 minutes. The reaction then proceeded to 35 cycles of 95° C. for 1 minute, 55° C. for 1 minute, and 72° C. for 1.83 minutes. The PCR cycle was completed following a final cycle of 72° C. for 10 minutes.

[0140] For both PCR cycles, the reaction mixture comprised 1 μl DNA, 5 μL 10× ExTaq Buffer, 4 μL 2.5 mM dNTP, 1 μL of 10 pm Primer L, 1 L of 10 pm Primer R, 0.5 μL ExTaq, and 38.5 μL of distilled water. The ExTaq Buffer, dNTP, and ExTaq were provided by Takara Bio, Inc. (Japan).

[0141] To clone the Lawsonia DK15540 hemolysin and Omp85 ORF for expression analysis, the resulting PCR products were then gel purified using the Qiagen MiniElute Gel Purification kit and mixed with a pET-32Xa LIC plasmid vector and ligated as per the manufacturer's instructions (Novagen, Madison, Wis.). The ligation mixes were used to transform competent cells of NovaBlue® E. coli (Novagen) and plated for ampicillin resistance. The transformed colonies were used to inoculate 3 mL of LB broth and ampicillin and grown overnight at 37° C. A 1.5 mL aliquot of the overnight culture was then harvested by centrifugation at 14,000×g for 2 minutes. The plasmid DNA was then extracted by the Qiagen Mini-Prep plasmid kit. The purified plasmid DNA was then verified by dideoxynucleotide sequencing. The respective plasmids were then transformed into the BL21(DE3) strain of E. coli for prokaryotic fusion protein expression studies.

[0142] Expression Analysis

[0143] To perform an expression analysis of the transformed E. coli, 10 mL of each of the transformed strains of E. coli (a strain producing hemolysin A and a strain producing Omp85) were incubated overnight in Luria-Bertani (LB) media having 2% glucose w/v and ampicillin (50 μg/ml) at 37° C. with shaking at 225 rpm in a conical tube. The next morning, these two cultures were used to inoculate two separate 10 ml pre-warmed cultures of LB media, glucose 2% and ampicillin (50 μg/ml) at 37° C. with shaking at 225 rpm in a conical tube. The cultures were then grown at 37° C. to an OD600 nm of about 0.8 to about 1.0. This took about 3 to 4 hours. One tube of each strain was then induced with 1 mM isopropyl-beta-D-thiogalactopyranoside (IPTG) for 3 hours at 37° C. The second tube of each strain was left uninduced.

[0144] Next, two 1 mL samples of each culture were collected and then pelleted by centrifugation at 20,000×g for one minute. This created two uninduced and two induced samples for each strain. One of each sample (that is, one uninduced and one induced sample of each strain) was then suspended in 400 μL of 1× SDS-Page buffer containing 10 mM 2-ME. The suspensions were then heated to 85° C. for five minutes. Next, the remaining samples (that is one induced and one uninduced sample for each strain) were suspended in 200 μL of 50 mM sodium phosphate, 0.5M NaCl, 5 mM 2-ME, and 1% tergitol. All of the samples were then sonicated for 4 minutes using 0.5 second duty cycles at an amplitude of 75%. The samples that were suspended in the buffer including tergitol were centrifuged for 5 minutes at 20,000×g and the supernatant was then collected while the pellet was discarded.

[0145] Once prepared in this manner, a western blot analysis of each of the samples was then performed. The resulting gel can be seen as FIG. 1.

[0146] As can be seen in the gel, the HlyA protein expression amounted to about 20 to 30% of the total cellular protein. The Omp85-like protein did not express as well, however. Additionally, both proteins were only observed in the total protein induced sample lanes, thereby indicating that these proteins are not soluble in the 1% tergitol buffer.

### EXAMPLE 2

[0147] This example demonstrates the purification of hemolysin A and Omp85-like Lawsonia proteins expressed in E. coli cells.

[0148] Materials and Methods

[0149] 10 mL of each of the transformed strains of E. coli were grown overnight in a media of LB, 2% glucose, and 50 μg/mL of Ampicillin. The next morning, the overnight cultures were used to inoculate a IL pre-warmed broth of LB, glucose, and Ampicillin. These cultures were grown at 37° C. for about 3-4 hours until they had reached an OD600 nm of about 0.8 to about 1.0. The cultures were then each induced for 3.5 hours at 37° C. with 0.5 mM IPTG. After induction, the cells were then collected and pelleted by centrifugation at 20,000×g for 20 minutes. The pellet was then suspended in a 33 mL buffer containing 50 mM sodium phosphate, 0.5M sodium chloride, 8M urea, 5 mM 2-ME, and 10 mM imidazole. The resulting suspension was then extracted overnight to disrupt the cells and denature the protein and thereby increase the solubility at 4° C. The extracted samples were then centrifuged for 20 minutes at 20,000×g. The resulting supernatants were then collected and filtered using 0.2 μm syringe filters. 16 mL of each sample was then loaded onto the sample loop and a partial purification was performed using Immobilized-metal affinity chromatography SAC. Following purification, the fractions were collected and a standard SDS-PAGE was performed (4-12% Bis-Tris gel in MOPS buffer). Following the running of the gel, a Coomassie blue stain was performed.

[0150] Results and Discussion

[0151] The resulting gel can be seen as FIG. 2. As can be seen, expression was not very good in the 1 L culture. However, despite the poor expression yield, there does seem to be some approximately 48 kDA protein in lanes 7-12 from a late gradient eluant peak. Additionally, there appears to be a distinct banding pattern of high molecular weight proteins in lanes 9-12.

### EXAMPLE 3

[0152] This example demonstrates the immunological detection of the Omp85-like and Hemolysin A total proteins.

[0153] Materials and Methods

[0154] The Omp85-like protein, HlyA protein, and IMAC fraction A12 protein were used in three Western blots. The first blot was completed with a Lawsonia ELISA antibody, which was obtained from convalescent pig sera harvested from a 9 week old pig which had previously tested negative for Lawsonia infection by IFAT and ELISA (a “strict control”). The antibody had been diluted to 1:50 in TTBS+2% dry milk. The second blot was completed with swine anti-Lawsonia convalescent serum which had been diluted 1:50 in TTBS+2% dry milk. The third blot was a conjugate-only blot completed using a goat anti-swine HRP which had been diluted 1:1000 in TTBS+2% dry milk (KPL, Inc., Gaithersburg, Md.).

[0155] First, the proteins were run through an SDS-PAGE gel (10% Bis/Tris in a MOPS buffer). The proteins were then transferred from the gels to a PVDF membrane at a constant 30V for one hour using a Novex blot module (Invitrogen). The proteins were then blocked for at least one hour in 50 mL TTBS+2% dry milk (w/v). The membranes were then incubated with the antibodies described above. The membranes were then washed 3 times in TTBS (1×TBS+0.05% Tween20), with each wash lasting about 2 minutes. The membranes were then each incubated for an hour with a secondary antibody (goat anti-swine HRP, KPL) which had been diluted to 1:1000 in TTBS+2% dry milk. After incubation, the membranes were washed twice with TTBS, with each wash lasting about 2 minutes. The membranes were then washed once with PBS for about 2 minutes. After the wash, 10 ml Opti-4CN (Bio-Rad, Hercules, Calif.) was added as a substrate. The membranes were then developed for up to 30 minutes, then rinsed with water to stop.

[0156] Results and Discussion

[0157] FIG. 3 shows the Coomassie stained gel picture of total HlyA and Omp85-like protein samples as well as partially purified HlyA protein from IMAC fraction A12 from the previous example. The result from the conjugate only blot is provided in FIG. 4A; the result of the Swine anti-Lawsonia blot may be seen as FIG. 4B; and the result of the negative control blot can be seen as FIG. 4C. Very little banding was observed in the conjugate-only blot. There was some background reactivity of antibodies in the swine serums to E. coli proteins. The reactivity of the HlyA and Omp85-like proteins was much more intense than in the swine convalescent serum as opposed to that from the strict control. The convalescent serum also reacted to the unique high molecular weight banding in the HlyA samples. Although HlyA and Omp85-like bands can be observed in the strict control Western blot, they are not as intense. Based on this data, it appears that the infection/challenge of pigs with Lawsonia results in the production of antibodies against the HlyA and Omp85-like proteins, which indicates that these may be useful proteins for a vaccine.

### EXAMPLE 4

[0158] This example describes the formation of a vaccine. Generally, any one of or a combination of a proteins selected from the group consisting of:
[0159] 1) a polypeptide comprising a sequence selected from the group consisting of SEQ ID Nos.: 1-455, SEQ ID No 466, or the polypeptide encoded by SEQ ID No: 456, SEQ ID No: 457 or SEQ ID No: 466;
[0160] 2) any polypeptide that has at least 85% sequence homology, more preferably at least about 90% sequence homology, still more preferably at least about 95% sequence homology, even more preferably at least about 97% sequence homology, still even more preferably at least about 98% sequence homology, and even more preferably at least about 99% sequence homology to the polypeptide of 1);
[0161] 3) any immunogenic portion of the polypeptides of 1) and/or 2)
[0162] 4) the immunogenic portion of 3), comprising at least 300, 290, 280, 270, 260, 250, 240, 230, 220, 210, 200, 190, 180, 170, 160, 150, 140, 130, 120, 110, 100, 90, 80, 70, 60, 50, 45, 40, 35, 30, 25, 20, 18, 15, 13, 10, or most preferably 9 contiguous amino acids included in the sequences of SEQ ID No: 1-455, SEQ ID No: 456, or the amino acid sequence encoded by SEQ ID No: 457 or SEQ ID. No: 466; and/or
[0163] 5) a polypeptide that is encoded by a DNA that codes for a peptide comprising the sequence of SEQ ID No: 1-455 or SEQ ID No: 466, are provided for use as the antigenic portion of a vaccine.

[0164] Veterinary-acceptable carriers, such as adjuvants, diluents, and the like will be added to the vaccine and the vaccine will be administered in any conventional manner.

The application's sequence listing, which the Patent Office published only in electronic form, follows.

SEQUENCE LISTING (466 sequences)

SEQ ID NO: 1 - protein, 395 aa, Lawsonia intracellularis
MKPLHNIILIMSIALMGVMGVSIILPVLPLLAHIFELTPTEVGLIITCFSLPSALFTPVAGIIADLYGRKKILLLGLALFALGGVGCALSTSFKGLLFCRAIQGLGAAPLGILYSTIIGDLYNEEERPKMMGIAGATISIGTAIYPALGGFVGEIHWTLPFWFSLLSLPVAIIALIYPYPYKGTKTSIKDYTKISGKLIFHSHSVGLLSITFLCFSILYGPILTYFPLIANLLYQASPIQIGITFSIACLGTAIIAINLAQLSRTYSHKKLLIIAAGCYFISQGLVIILPLQSQNIWLLTLPIFVLGIAQGISFPLVNSHITSLAPTSNRAIVMAINSTFMRLSQSISPIVFGIGWSFFGWPGPFIFGLFTSIILALLIMKVFSRCNPISPIFDN

SEQ ID NO: 2 - protein, 392 aa, Lawsonia intracellularis
MPSFSFVLRCCLLFLMVLTSQTLSVSQPLREEAEGNLPQHIEATLTNLIEATSSTKQYPSVSQLDTILQFVTSTNEQAHKILPATRDYGKGIFYKTTINIPLSTLIKYFLNPEIPGEALYPTSIRRNVWQEGSEILQNSNIFLAAPLPPQKPIFSRGTEYEEITPDISSGCYYNYILKRLFILYKFKSETAFITVSFMPKESSVGLRGGVIGKDTEWDYVYGPDIGTNLPMLTWAKTYLYGSATINIFTQKPNSPTTDIYIFKWTSAGWSGMNVVTHKHIRNGVIRFISGLKQIMESPYLPSEQEIIKKHSELNTMSLNELQSALKPFASKLAAKSLKDSTLSKDNFQKILKNDVYPTTLTKENAVAELLKRYMKQKINQTMEGKTTITSKK

SEQ ID NO: 3 - protein, 421 aa, Lawsonia intracellularis
MQNIRSSYTDSINFFGKTSPEELIKIYGSPLYVYNESIIRQRCKEIKSLSSYPNFFVSYSAKANTNPTLLSIIKDEGCLVDAMSPGEVYLHKKVGFKSDEILYVCNNISAEEIQYAIDNKILLSIDSLSQLETYGKLNPGGKIMVRINPGIGTGHHKKVITAGKETKFGINTEQFSDVKKIVDTYQLMLVGINQHIGSLFLDPQNYLDSIAFLLQFIDNNPWIFEQLEIIDFGGGFGIPYKKYEEQPRLDLKKMSEQFNTKIMDWVASTGYKGRFYIEPGRYIIAESGILLGSVHVVKYNGPIRYIGTDVGFNVLMRPVLYDAYHEIEVYRKNGTPDLQLIPQTVVGNICESGDIIANKRPLPLIQEGDIIGILDVGAYGFVMSSNYNQRPRPAEVLIQQNGEPKLIRKRETIEDMNIQLH

SEQ ID NO: 4 - protein, 353 aa, Lawsonia intracellularis
MPITIAQQKSLTIEQQPIVNLTIEDEQLSSEKRKIVEENYTTTIEKTLSAEPKPHEQLATITKEKIEHIEPIVTTNDIHKNNLLENGTSFNEKSVILQNSIEIPEDLSIYSPSLHIQNSPEKSFLSSQSEPDNNSQCINNSSKEIDTIQEVPITSSDSAIINQKDNKHHDNLLTATTTRQKKHNNSRQKNSRHQKSSLSLLDMITIPTEENQETNHTQKALNTDSYLSMVGHPEIPEEHIITLTETVDTYKKDTLSVKKDIPDLFSVHHPTEVIEDFTYPKEQSEQLSMMQLFSSTLNIVEENDLGTHSKELFQELDITLGLLQQAIQTKQSENLVSFSQVILSLSEQLKLNI

SEQ ID NO: 5 - protein, 626 aa, Lawsonia intracellularis
  misc_feature (544)..(545): Xaa can be any naturally occurring amino acid
  misc_feature (558)..(558): Xaa can be any naturally occurring amino acid
MSIVIGTAGHIDHGKTSLVQILTGINCDKLSEEKRRGITIDLGFAYYVSPTGEKLSIIDVPGHEKFIKNMVAGASGIDVVMLVIAADEGVMPQTKEHIEICSLLGIKHGFIVLTKTDIVDKEWLEVIKEDIKLFLKNTFLHNTPILQVSSTTGEGIKNLKTHLNHYLSIPHSKQKTDIFRLPIDRVFTIKGHGTVVTGTIASGSIATGEAITILPSNKKTKVKQIQYHGNIVETAYAGQRTAINLHGINTSEVKRGDILAHPDTLVLSTRWLISLTCLPSSPRPLKHCSEVHLHHGTQEILAQLYFFNKNSLAPGETILCEIRLKKPLVGIFGDHVVIRTFSPLQTVAGGSIVNPIASPISRHTITDHTIDTLLSLPSATEEELVKKQIEFLDATGIYLTTLSIVTNIEHNRLLSILTSFIERGIIICFDKENYGYLSVNTMKTLVEQCLVAITNFHKKNPIKQGIEQGTFFTNYKIWGKILPHKLIGFIINQLIQKGNLTSEGNYIYLPSHTISLSFEQQHLYDNILKLYIEAGYTPPKLSNXXTTLNSTIKQATPXITLLLERKALTHITEDMYYSTQAIKKLKSILQNWFNSHKELDIATFKELSGGLPRKYSISLGYVVLLL

SEQ ID NO: 6 - protein, 354 aa, Lawsonia intracellularis
  misc_feature (277)..(277): Xaa can be any naturally occurring amino acid
  misc_feature (280)..(280): Xaa can be any naturally occurring amino acid
  misc_feature (282)..(282): Xaa can be any naturally occurring amino acid
  misc_feature (284)..(286): Xaa can be any naturally occurring amino acid
  misc_feature (288)..(288): Xaa can be any naturally occurring amino acid
  misc_feature (290)..(291): Xaa can be any naturally occurring amino acid
  misc_feature (293)..(295): Xaa can be any naturally occurring amino acid
  misc_feature (297)..(299): Xaa can be any naturally occurring amino acid
  misc_feature (301)..(306): Xaa can be any naturally occurring amino acid
  misc_feature (310)..(310): Xaa can be any naturally occurring amino acid
  misc_feature (312)..(316): Xaa can be any naturally occurring amino acid
  misc_feature (322)..(323): Xaa can be any naturally occurring amino acid
  misc_feature (326)..(330): Xaa can be any naturally occurring amino acid
  misc_feature (333)..(334): Xaa can be any naturally occurring amino acid
  misc_feature (336)..(336): Xaa can be any naturally occurring amino acid
  misc_feature (338)..(339): Xaa can be any naturally occurring amino acid
  misc_feature (341)..(342): Xaa can be any naturally occurring amino acid
  misc_feature (348)..(348): Xaa can be any naturally occurring amino acid
  misc_feature (354)..(354): Xaa can be any naturally occurring amino acid
MTSDIHLSLAQIHNLLISREKSVEEVTQACLDRIIATEPTINAFITICAEEALSEAKKLDQSTPDPKKPLWGIPIAVKDNILTKNIPTTAASCMLKHFIPQYDAFIIQQLKNAGAIIIGKTNLDEFAMGSSTETSFFGPTYNPWNTKCVPGGSSGGSAASVAAFQCFSAIGTDTGGSIRQPAALCGCIGLKPTYGRVSRYGIIAYASSLDQAGPITRTVEDAAIMLSVLAKHDPQDTTSSFKATDNYYINLKKQDLTGITIGIPKEFISEHIDPPIXCIXTXSXXXSXAXXLXXXNXXXFXXXXXXIFMXYXXXXXYSRTYXXSCXXXXXVLXXYXTXXIXXKNLGGXGSVLEX

SEQ ID NO: 7 - protein, 348 aa, Lawsonia intracellularis
MPPAKFTAVHWGSRVSKEDEKIILEWVRKYRNTYYATGLASPERSNEPIQPIPDTIPYNKQKAALGEKLFNDRRLSHDNTIRCASCHVTSEGMADGKQFATGINKQKGHVNAPTVYNAIFNTRQFWDGRAANLQEQASQPPLNPIEMGSTSWDEILGKLANDKKLTEEFLAVYPDGWTEKNVTDAIAEYERLFITPNSPFDRWLKGDDTALTSDELRGYKLFKAYRCATCHVGKSMGGQSFEYMDLKKDYFADRGYVEGVDDNGRMAFTHDPRDLHRFKVPNLRNIEMTAPYLHDGTVTSLDEAVRIMGIYLVGMDIPKSDRDSIVLFLRTLTGQFNGQKVLGTPVPQ

SEQ ID NO: 8 - protein, 519 aa, Lawsonia intracellularis
MLTRYQEAIYYMRGFYASRKQEDYDRCIKELNKAREYLSQAKKFASTSTSNQYLEKDINEIGKIFTDYDVAVKNLYSKSMDFNEESSKGTNVIHNVFQQYSQIVSIMNKQYANDDNALLYYSELGTLMMQLYLLRGDYSSALREQDIDNLKKSTQGIDELMNKLSIFKNRFRAEDMRNGLQTLIRSIGVYNQLLKNLVSMTEQSKVDLDYRRQLADALGEKLMKLTNDNLSKIQTEATYVNTRLQRANGLIFIITGILLLITIVVSFIVTRSITKPVTQTTLFAQNVAAGHLDQHLKITSTDEIGQLGIALNTMVDSLKAKILEATQQSEAAKRKEEEARVATAKAEEALKRAEQGRHEGMVTAAGRLEDIANVISSASTELSAQIEESGRGANEQAARVKETATSMEEMSTTVVEVAKNASETSDISSQTRQKAIDGADIVRKVIQSIETVHNQSRELKSDMAVLGDHAQSIDQIMGVISDIADQTNLLALNAAIEAARAGEAGRGFAVVADEVRKLG

SEQ ID NO: 9 - protein, 879 aa, Lawsonia intracellularis
MVKLNNVINFNKKLAKVNVTSLSMLLFNFIAIFFLIQSDAYAVIFSNSQPRIFTDVNTPAETYFGGFDMRDPRSPINSGPTSMTFTTHNLAQNQILAASGGSMGTAARGSVVNGDATITMHNTVCNFLYGGGYSEGPDVVVTGTANISVYNSQLIDIFGGGFDNGGHNGHTSVGAVKILVDHSVVQNLTGSASSVGIESQGRYAVFGDVDIAVVNGSDVTTLTGTSTSSAHIKGNLSILVENSHITDLNCVDHALLDGNLFVRIGPGALVDRLFLSTENLPKGSSLFEIDGGRVDGLFVGPYAGTLNDAKVLMKNGYVLNLDPSPRTPAGVIKNLDIFMEGGTIAWLNLAPQQGVSHNVTLHLDGGTVENLRFGNFPGANFDGIISFAKAEVKGGTIENIEPLRRGVLNSSLIFIPGGLSRVHTVENGRGLGLSNVTVQEGARTVWGLPGNRFTIEADDFDLGGTIILPSTDSTIELVVNNHLIASGGMFEINDADRSRVTPLVVFTGNPGSSVNIIDPLSVNLDLPLSFLGTSGIVLAQATPNLADPKLFEPIIHKGLMWGDIVFDATSNTWFINNIRESKDYYGYLSVQGASNWLRQQHMITTQRRSANALLHKHDGLWVDIQAGHEKIGTNYGNSKMPWVMASAGYDYRKNINDNIAMLYGFALGIGDGHQKWTLVSKMKNRITMGLLDGYLGFSYNPIGLYGLVALQGSVSKIKTKSPGFFVNENWTEVVPTESLELGWHYAFNEFFTITPRAQMILEQTPKHSIEFCCRKNKEKIKLHRNTTVTTVAGILANYNIEWLDIHGSVDWIKGVAGTYKAHSELFNKTFKDKNNNSVLRASLGCDYIIRENMSIGITAFGDMINNKGIGGQANFSYKF

SEQ ID NO: 10 - protein, 322 aa, Lawsonia intracellularis
MGLFFIMRNDWTFKEAKQIFNLPLLELLYKAQTIHRKYFDPNKIQISMLLNIKTGNCPENCGYCSQSSHYKTDLQKEPLVDIDTLISEAKKAKELGSTRFCMGAAWRSPLDKDLKIVCQMIEEVKKLGLETCVTLGFLKEHQIAMLKKAGLDFYNHNMNTSPEFYEHIATTHTFDDRLATLKAVRKFGIKLCSGGIIGLGETIDDRISMLLLLATLEEQPESVPINRFVKVAGTPLNPQSDIDPFDFVRIIALTRILMPKSYIRLAAGREQMSDELQTLCFMGGANSIFYGGRLLTTDGPQPEQDDLLFQKIGLEKVQTICH

SEQ ID NO: 11 - protein, 381 aa, Lawsonia intracellularis
MYYRYKQYISHLHDTKKYRSLPVIHKNYKKDILDFSTNDYLQLAYHPNLINAAIMTGSTYGVGSTGSRLLSGNNELFERLETTIAQDKHTETAMLFISGFQTNVSVLSALLDHHVLKMQPLVFFDKLNHASLYQAVFLSKAELLRYYHNNMEHLSSLLKKYKDDNRPKFIVTETLFGMDGDIAPLTDIVSLSSQYQTFLYLDEAHATGLTGIHGYGLSTTVNLSHIPHIVMGTFSKALGCSGGYIACKQLIKDYLINKATGFIYSTAGSPMVLGAAQEAWNLIRTLDNQRAHLNSLSKELRDGCNQLGFNIGTSSSHIIPLILGSEEDASHVHKKLLEHHILTSYIRPPTVPPKTSRIRIALNVGHNKADIERLLQLLSTL

SEQ ID NO: 12 - protein, 541 aa, Lawsonia intracellularis
  misc_feature (526)..(526): Xaa can be any naturally occurring amino acid
  misc_feature (532)..(533): Xaa can be any naturally occurring amino acid
MIQTGSINGTDSDILKKLTYSKIHKEAYCYKEPLSPHLAAKLEQDEININNIILPNASNLVIEGAGGLLVPINQQYLLLDIISYLMLPVILVTHSRLGTINHTLLTLQALKSKGIVEKEIETYTADIAQNPIVQKTISQIEQLRKEVSERCGINKKIKELQSIPLAIGSLIRSCGHKTGREHYIQTLSQGLALFSMAFYGKPIIYRTTDFKTNEYRNLLGGILFEDFEDNPMLGYRGVARDIHDWEIDAFKAARSLYGAKNLQLMLPFVRTIEQARSMRSYLSEVHNLRSGEDNLQIFLMSELPSNAILARQFIQEFDGFSIGSNDMTQMVLATDRDNQSLSHIYDEEDPAVVWAILVTIFTGQKYGKKVGFCGQGVANSAILRGIVTISGITSASVVPDTYYQTKQEIADIEASNISLSELGQWLTKQHKNNLKKLLEEHGYNLFNTNPTNQDIQLWYNKNISTLCTQLQKNLTTSQAPKIAKTLKEFRTLFHKAVIYATWPWEETVNDALYQAGFRSFEEQKVXLEQQRXXIMNTISYK

SEQ ID NO: 13 - protein, 359 aa, Lawsonia intracellularis
MNIRKKTRKIYIGNIAIGGDAPIIVQSMTNTDTRDIEATLKQINQLHAVGCEIVRLAVPDANAAKALKAIHDASPLPLIADIHFDYRLALTALESGIEGLRINPGNIGERKKVVTVVDAAKAHKASIRIGVNSGSVEKHLIDKFGGPVPEAMVESALNHIKILEDEKFYEIKVSIKSSSVLDTIAAYRMLSKSCDYPLHLGVTEAGSLIRGTVKSSVGLGILLSEGIGDTLRISLTEDPVEEVPVAWEILRALGLRRRGPEIIACPSCGRAEIDLIRLTKDVEACLVNEKTPLKIAVMGCVVNGPGEAKEADIGIAGGRDKGIIFAKGKVIRSVHGQDKLLNVFMEEVNKVIAEYNTTQ

SEQ ID NO: 14 - protein, 398 aa, Lawsonia intracellularis
MVSIDDQLQLIKRGYVELINEESLRKKLSNEKPLVVKAGFDPTAPDLHLGHTVLIHKLRHFQQLGHNVTFLIGDFTGLIGDPSGRSTTRPALTVEQVQANAETYKKQIFKILDPLKTNVVFNSKWLMSMSSVDFIRLASHYTLARMLERDDFSNRYKENTPIALHELLYPLMQGYDSVALKSDIELGGTDQKFNLLVGRTLMSHYNIEPQCILTMPLLEGLDGVRKMSKSYGNYVGIDEQPYVQFSKVMSISDELMWRYYELISTSSLSEVEKLKQNVKEGHLHPKKVKEQLAVDIVTQYHGKEKAYEALQEFTAVFVNGALPDDTPEFICNYGETSKPPAFLTDSKLCTSRSEAKRLIKQGSLTVNDKRYHDVELPLEPGDYIIKLGKKRFLRLQVQ

SEQ ID NO: 15 - protein, 410 aa, Lawsonia intracellularis
MSLTPLSEKLRPNNLDTFIGQNHLLERLQYIISAPRLPSLLFFGPPGCGKSTLALLLAYKKSTNILRISAPETGIQQLRQKLTDIDILILDEIHRFSKAQQDFFLPLLESGKLTMLATTTENPSFSVTKQLLSRLNVLQLRQLGYNELKELVKKGTLFLNILLPDDVINFLATTAHGDARTLFNLIEYISILPEEKRVLEYIKINLPEILERHDKDGDSHYEYASALIKSIRGSNPDAALYYLACLLEGGEDPRFICRRLIISASEDIGLADPQALSLAVSCQQAVEFVGMPEGFIPLSETVVYLALARKSNSTYAAYSNAAREVRLHGAQPVPLHLRNPSTQLQKQWGYGREYKYPHNYPNAWVEQEYFPSTISNRSFYYPKEQGEEPKLNMWHNHIKKKYSIPEESPK

SEQ ID NO: 16 - protein, 484 aa, Lawsonia intracellularis
  misc_feature (426)..(426): Xaa can be any naturally occurring amino acid
MTNSLPLQVRSIRNIWLATGREFPKSGDVFSSKNNVKDDSLAWGLLERFKKIQASELLSFEKDVLSASRNAPRDFRLRTLLGFIAVEKGDLSRAQLLWKEAESLASTGLHQVWHMFLQARLLEIQGRFSEAIEIYQNVLRLYPSWLDAEYRQIVCHVKMGFAEQVQTKIFQLIEQDSSFFNRFFIDPELDRGYLSILSELLVALEEKRRLASDEKIKAEKLLIELDEWFPKDHAIANTFRQKLKLVINNLSLNTYVAFLSIIQMRPIIENDITKQIKYEIKNLKQIFKIYLKQLEKIRDEAAWFPFPNILIEFNKNFNECANIFNWAFTSNFNDAEVFKKARGYAPLLQEYLEGLTQRLKFLRIVRDVTLFILILGKTFFWIEVIGLLLCATSVPLIAVFGSKVGLGWLSTLIKEEQWGLQRVLLXIISSVAIGISAIHTTLVFERKRDQLIAEARGQREKIQHIRLKHINEAKKEKQKSIEKI

SEQ ID NO: 17 - protein, 416 aa, Lawsonia intracellularis
MDKLIIEGGYPLKGTVTVSGSKNAALPILIASILANKKVTLHNVPQLRDIRTTIKLLEILGCTIQQTEQCIELTPGTLQHEAPYELVCTMRASILVLGPLLAKLGKAKVAMPGGCAIGARPIDLHIKALEKMGAKFTLKDGYLIGDCTKLKGTHIYLDFPTVGGTENLLIAASIAEGETILENAAQEPEIEDLARFLIACGAIIKGHGTNVIHIQGVPSLNGCTYSIMPDRIEAGTFLTAAAITKGELLISGCPYKELEAIINKFMQMGIHIEKRECGIYVAPIKTLKATDVTTRPFPGFPTDMQAQIMALMSIAYGTSTVNETIFENRFMHVQELARMGANIRLNGHTAIVTGVKELKGAPVMASDLRASASLVLAGLAAKGITTIQRTYHLDRGYEFIEKKLNAVGASIQRTNE

SEQ ID NO: 18 - protein, 565 aa, Lawsonia intracellularis
MKIHSSAWIIIGALGLWFGVENPICYIPGLIFFYPLSLIILGHNAPGKVDALRAGWILGLLGSSLSLYWLAVPIHTIGGLPWLLACPCVVLVGGSLGFFSGLFSFFVFCFHHIQFWQKSLMLGLVWYLIEWIKSWFFTGFPWLPFTMGFARYPVMLQCASIIGSYALSGLYVAILCLVFYSILYSQSKDIHKCSIKWPLIRALSVACILFISIVLFGYITLKTNPIDMNIQDGVTIAIIQGNDDQIVKWNPQTKYRSAQKYVRASEELLKNIFRLHEGGNTYYPDVFLWPETVILFDFKAEVEKGIHNPLTYFVNKYQIPVIFGAPGIETAGKDITIFNRLYYYSPGNYRLDCSESNKINKSLQWYDKEHLVPFGEYTPLFFNFPFLSQLLQEVGTYTPGEKVAPLLFEIKETVKKGSIACYRTISMGILICYEVIFPELARKRVAEGAQVFITVSNDSWFGHTIAPVQHLQIAQMRSIEFGRWMARAAVTGISAFIDPYGRIIDSTKIFIPTYLVGTIRPIIDNTVFFWIEPWLPTFAILVLCIMLWKNNLITHSCGHKSRGCS

SEQ ID NO: 19 - protein, 302 aa, Lawsonia intracellularis
MSTAKQKINSDLPTQQQATEAFTLATAQTQHNVRILLNNIASNPPQALIIEGGTLDERFSIALWYAARLNCIYGTPCLTCPTCLQIGAKLFHDLFLLHGAEGSIKIDDIRKLRTVFGEPAHSNGKKVVILAEAQHLRTEAANALLKSLEEPHPQTCCLLLVPQREQLLPTLVSRSWTITLPWTSVMTSSSSELIEEWEEKLTTFLITGKNWFNFTTNKNVVEASLVQHIISLIRKTIVLSLKKQRKNQLVECLSILSPVDFLNLQDILSQSESALHIMVNPTLVLNRLVTHIYLAYHNALQL

SEQ ID NO: 20 - protein, 734 aa, Lawsonia intracellularis
MLNRQFMVGEVVIQHSLKKSQPQEFLAFVGQGQTSLLHLTECIHKQLLPLLYEKTSALKKEMLIATPEQVEQITHHIHKMNMITIESISERWITPDNNPEIANLFTPDHPTQLPELLKLSPYNLLKYVSSLRSGYRITLQLAKLTAEDVLELLWDCKGMITHLELFNLKEWQQGHLIHLAAINELQLAINDPNILRLKQLLVSMIRRLELLNTEASYKRYKKFIVILRNLPILQAPYKISPLRSRIGTDSTSNSNLRHGMGLAAPQTLPASSRRVLAKKQLFNPMILPVHVPLAFQKTWIVTTNTEGINYKILSFLRKLPGLRMLGRQKKEEWQALANIKIKPYGNIIAMGGIGSLPDNGIYLRKIDKKKQTNSWPNITYLNTKCANLLKIIIGFVPATLAFLYTQEWWVLAWFGSTIWFVITGIRNIAQAILGGGSFSKTSLLRWKNFISWSRICDSLMYTGLSVVLLELIIHDLILQKTFGFTLSNHYIIVFTVIAICNSLYIAGHNILRGFPKEAIIGNLFRSIFAVPLSILYNDILIESLLLFNIANPLAVLQPGAAIISKSASDTVAGVIEGFADKNNNYRLRSWDYKTKLEHFFNWYTKLELRFPDLDILFLLSKPYELFKITSKEAPELQRESIINALDFMYFWMYQPYAQQTFRSILNTMTREEKIILAKGQNVLLLVQEVSQLFIDGYMGKNFARALSFYLTSHETYINSIVTAIQHKTYNITLE

SEQ ID NO: 21 - protein, 454 aa, Lawsonia intracellularis
MKKMNIQKSSYEEYFPLLRQIRASAGSGKTYELTYSFLSLLNKSINDNNTNSSYNKYEHSWTSILAITFTNRAAAEMQQRIITRLKQAALNTQPIPGLTSTQAAHWINIFLRNYSELNICTIDSLLHTIVHSTALELHLPPDFQPIFSTEEALTPLLDSILKKTQHNERLYIILKEACSDILFHTKHNNFMIGSTLREKVLSILPLLINGEQEITSPQEITAHLTIKIQSVKKIATELASCIKNEQLSIHSNFKKALEACQIGTQHTIPPKSTMLRKPNLTDCILKSSKNTPSHHTISLYNTLQSLITYLDTTGVLLKNSQKTIPYVKLAKELYNLLPEFFCKQRIILAELIPSLAQQAVSGHYGISEIFCKLGTNLQHILIDEFQDTSHEQWAVIQPFVVEALSYGGSLTWVGDVKQAIYGWRGGDTTLFEKVSATRIPCICRTRTDISITSY

SEQ ID NO: 22 - protein, 455 aa, Lawsonia intracellularis
MTNTHYSSLSVTLLPIKTLGEAAIPSPLPYCDIKKNEYIHLCLNQEQIEDLGSSPTLSLELAGPRQDLYFEPQTTRCAIVTCGGLCPGLNDVIRAIVLEAHYAYSVASVIGIRYGLEGFIPKFNHTPIELTPDVVKNIHCFGGTILGSSRGPQQPEEIVASLVHHNINILFVIGGDGSMKAANSITKEIHQHNLRISVIGIPKTIDNDINFIPKSFGFDTAVEKATEAIGCAHVEASGAKNGIGIVKLMGRESGFIAAQSALALKEANFVLIPEVQFTLHGNGGLLPALEKRLSERSHAVIIVAEGAGQHLLDSQDETDPSGNPVLADISTLLKNSIKDYFSKKDIPIILKLIDPSYIIRSVPANANDRVYCGFLGQYAVHAAMAGKTNMVVANIMDNYVHIPLNMVIKKRRKLNTKSGLWRAVLESTGQGRLTGMLPHCNPLTNEENEHTKVII

SEQ ID NO: 23 - protein, 290 aa, Lawsonia intracellularis
MKEITNLKNKKQHNKKHRQLPYTKQLTKMQHPNFSEYSLDFLSTISILSGIKPVLDLIEKEPQKIDTIFLQKGLCSKEYQKVLDLCRQTNIRFIFTTSKVLNRFCLTNHQGIVARLFESGFIELEDLFDKVPDAPLPLIVVFDQIQDPGNAGTIIRTLYSLGGAGVIIPKHNGVFLGQDARRAAVGCLERLPISKAINLSRAIETANEKGFHIYGTSIEKDSKNVFEAELKFPALLILGSEKSGIRLQLKKRCHTILHIPMVRDVNSLNVAQAGGIIISCFARCQNNFTV

SEQ ID NO: 24 - protein, 238 aa, Lawsonia intracellularis
MRIKVSHYLMLLLLLLNFGILEGCGNKKLSGSDRFVSTRSYSRCKEEKTGTVYLPADDGTPLNKTEFNAFNSKGQFDRNIDSKDMRDILLHFKKYVRHERKTVEINVQRASRYLHHIIKTFRQEGLPDELAYLAFIESGYNPCARSCTGASGVWQFTCATGKYYGMSKNSWVDKRRDPYESTRAAAQYLKRLHQIFNDWHLAITAYNAGEGRVSRALAVFFEWYLHFLEPDQVVYGMA

SEQ ID NO: 25 - protein, 334 aa, Lawsonia intracellularis
MGLLKDMYHKVVEEHFPPTITISFGDKILTYTKKTWNINGEIKGLRYGDNPDQPAALYEFTSGELTIGDTIWRTSGGIISSLTDAELIQSGKHPGKTNLTDIDNGCNILQYLASRPAAVILKHNNPCGVAWSKKSIGNALEKAFWCDRIAAFGGAIVVNRPLDHDSANLIFKHYFEVIAAPDYEPGVLELLTTKKNLRILKLPGLNSLDQLTHSHYLDIKSLCDGGLILQESFLNRVRSTASFLPATATSKDGVTISAKQPTDEQIEDLLFAWSVEAGVSSNSVIFAHDGATVAIGTGEQDRVGCIELAIFKAYAKYADKLTYQNYGLSLYEYV

SEQ ID NO: 26 - protein, 219 aa, Lawsonia intracellularis
MRIESDGSWRQVPPNNSSTSSVESSQGAQQTNQTEETSGRRSSSSFWGRLCSRCSSGLSRVGAAISSMFSSLVSSIRSLSQYITRDKTASGVSSGSLAPRVSSHGIGGQDGSTRHTTSNPRDSAPPDFSPPPPPINKRHGGPDSDPIYDVPHGVGSTSPSLLPHGKPDTDPIYDTPRNFGIVGAPIPMPQSGGNRSQEPIYDTPKKPGESSSSSSSSSS

SEQ ID NO: 27 - protein, 339 aa, Lawsonia intracellularis
MLVESSIQATEKGLVQLRIQRVPNSINPGELLITVSDSGKGSPPITRSPLALIHAWELATSTGGSVTMKSEPTGTTISFSISLTAKQTTTSLSHQHDESITTTEQPTTQLSQIIIVDIVPSNRQLLTYYLDELPYNIFEAQDVTTVYNLYKQSPGAVIIFGPELSETIAIETIGAIRVFEGEHNFLPAPILAICKTEAQKERLLRIGCTHVIIEPLTRKTFRQTILQLSPISSHTQAIPSPLLESTSKKIKQTAPTSSVNSKLIDTVNDSQIPCMETPIQDIPISPHASLYSEDNTSEYTHEKKGIALLKTPDQIKTKKLSIIKGEPTPISSSTHRTKE

SEQ ID NO: 28 - protein, 343 aa, Lawsonia intracellularis
MTAIHSYSKKYTESTQTSPEYLLKLAHEVLTIEMDGIETIRERLGNTFVEALLLLSSCKGRVIVTGVGKSGLVGRKIAATFSSTGTPAFFMHPVEGAHGDIGSLKSSDLILSISNSGETPELNAIVPTIKSFGTPMIALTSVLNSTLAKAANVVLHTEVPKEACPHGLAPTASTTAVLALGDAIAVCLMSLKSFTEKDFLRYHPGGMLGQRLTLSVTEVMRTDGLPTVHLGTSQCNALKTLDKGGLGVVLIIDKKNTVCGIITDGDVRRSICYNRLKQDAPVEQIMTPRPKCGKPQDTIAILLDIMEQKAITVLPIVDDNYKLLGIVHIHDLLGKGTIIFSDR

SEQ ID NO: 29 - protein, 364 aa, Lawsonia intracellularis
MDPLTHALTGATIVYTFPKESRPWWFLVWGMLVAMLPDIDILFVSSAIDYIKVHRGITHSLAGAWGLAFICTIPLVVLTALRPQPNELPPPKQISWTLIEAWFFTYAILILHIWLDVMNSYGTQIFLPFSEYRVRLNSLFIVDLLLILPLIIGLFFRRNNRFIMVLLLLWTIIYPLTNIVIRLGLETYLTHSYLAKNTFQTQKEITLPRHNTEEHIIAVHLIPDAFTPFHWKLILDKGEHWNVSGYNSFTSPPSKFTSFKKPPEVLWDMLKEKSSIFRTYEQFVVFPVLTESYETQTGKVYIFSDLRFGSTIPFINDLQVKREGEELAFRIMAHINHAGELSSVRFITGFGAGGDTGWVDPLPD

SEQ ID NO: 30 - protein, 313 aa, Lawsonia intracellularis
MRVVVLGGSGFIGSSLIKTLEGRDHSIIVSTRDSSDISISPSSNVSYVVWNGIDREPCFKMFDGADVIINLIGENVASKRWSENWKEKIVTSRIQVGKTIVSVLEELKSFPSVFIQASAIGYYGYWKNFDTAPQCTESSLPGNGFLAQTVIQWEASTSALDTLGIRRCIIRTAPVLGMNGGILKKMLPGFYFGLGSIFGSGSQPFPWIHINDEIAAIMFLIDNKEACGVFNLVAPEQLNMKHFAQCLGKVLKRPVFIHIPELLLRLTLGEMAEELLLSGQRAYPEALLEKGFTFRHGLLLPALKDLLDNHLAM

SEQ ID NO: 31 - protein, 233 aa, Lawsonia intracellularis
MILEYTMNTQYAINTSVVRSFASKCFTILSSLNIVSLLILFALQNILLLIKYVPYLLQYYDQIILKFGIATYSDSMIPLTPWLYLTAISPINLTSFLMITNMSLSAIVLIFTWLLAIITKQKKNVPFIAGLLLLSTMITLLMPYITPDSILFAAIVLLAIICLYKGWMKSSAPFWLTIGFLLTGCAGLTGGLVGFFIPLISSLIFLIWSGNLRRAGCYDGALATKTWILKCIF

SEQ ID NO: 32 - protein, 435 aa, Lawsonia intracellularis
MAVSTTTLNAAPELKIKLLWTVGLLCAYRIGVHIPVPGVDGIALTHFFESVAGTLFGLFDMFSGGGLRNVSVFALGIMPYISASIIMQLLQVIIPDFKRMAKEEGAAGRYKITQYTRYGTVIITLIQGIGIAIGLESMYSPTNIPIVLEPGWVFRIVTVLTLTAGTVLIMWLGEQISEKGIGNGISLIIFSGIVVGIPGAIVKTYQLIILGDMNILIALVLMLFMFAVLTGVVFMERAQRRIPIQYAKRQLGRKVYGGQSTHLPLRVNTAGVIPPIFASSLLLFPATMASFDISDWLKDIAVWFSPSTILYNCIFLVLIFFFCYFYTAIIFDSKDISENLKKAGGFIPGIRPGEKTCEYLDGVLSRLTLWGGVYISIISILPMMLISQFNVPFYFGGTSILILVGVAMDFMSQIESHFISKQYEGLMNKKTKGRG

SEQ ID NO: 33 - protein, 233 aa, Lawsonia intracellularis
MVATILEELEKQVRPGLSTLYFEDIVQQMCREFKVKPAFQGYYGYPYALCCSVNEAVVHGVPSEKKILQEGDIVSFDVGVLYQGFYGDAARTVPVGTISSEASQLIQITRESLELGVLETRAGNHLYDISSAIQHHVESAGFHIVKRFVGHGIGIGLHEKPEVPNFVPTVGLGIPLKVGMVLAIEPMVTIGSPEVEILEDKWTAITCDRSLAAHFEHSVAILPSGPCVLDSLV

SEQ ID NO: 34 - protein, 314 aa, Lawsonia intracellularis
MTKLSPLMKYQTLTYGLSIQQGLVVDPKIVFFSGGTALREVASCLTQYTKNATYLITPFDSGGSSAVLRQAFSMPAVGDLRSRLISLADRTSPEYKEKIFLFEYRLPKQASSKALLDEMCQLRDGNHPMMYHFSNVTLQFVKEEIRFFLTQLPEGFDLSGASIGNILLTSRYLQENRDLFAAVTFFSHWLGSKGVVRPLIDANIHLCVQLENGEIYIGQHRFTGKKDSQVSSPIRKIWFSKSLDKVELAVLKADTFICEYIHSADLICFPMGSFFSSVVANLLPVGIAEAICNTCCPKFLFLILIMIQSYLVFL

SEQ ID NO: 35 - protein, 564 aa, Lawsonia intracellularis
MYIGLDMGGTHTDAVIINNKTVVAEAKVPTNHKNFSSSIEQALTQLFFTSKISSSLVTRITFGSTLAINAIVQNKQSPVGLLLGSGPGINPNWFTIGEHSFLTSAKLDHRGIEINPLQRGPLQTCINEWKKNGINTFACVSKFSIRNPKHENDMELVIQKIFEHYTTPVISKGHMLSGSLNFPRRITTAYWNAAVWNIHNKFITSIELVLKKFSINAPTFLLKADGGSIPLALSRSIPIEAIHSGPSASIMGLIALYPTSETCLLLDIGGTTTDISIIVKGKPILSTSGLIIQKKPTLIRALASYSIPLGGDSLVNIQLMDGIPHIKVGPLREGPAMAFDGEHPTFLDCLNILGYAQVGNITKSYDGISLLSKKYNIIPQDIAQSVVYSAQQQLQEGISHLLNEINSKPIHTIEALLENHNVQPTLCIVTGGPASSIKPLLNTILNLPIITPTKYTLVTNAIGAALTKPTAVLELYANTERQVCLVPSLNTQYPIPNSYSLKEACHDASNILKKYLQDITNTTTSPIIDIIEAQEFSTLDMVGKKGKDIRVVCQVRPELEFSLN

SEQ ID NO: 36 - protein, 299 aa, Lawsonia intracellularis
MDCNTKLLLRSIRVVTSQIKTFILLAVYIAYLFILFMSTWEDRPYYCLGLALLMNIWSYWYSDSFVIRMYNAEPLSFDEAPMIHTMIEELAQSAGIPKPRIVVIPEDAPNAFATGRDPEHSVVAVTEGIIRILSPEELKGVLAHEVAHIANRDILIQTVASVIGSAIVSIANLLQFTAIFGFGQHNEDGENSNPLVVLAMALLAPIAATIIQFAISRSREYLADATGAKLTGKPLVLAGALEKLFNWNQQIPMQQGNPSTSELFIVAPLFSGNMATLFSTHPDIHDRVIRLRAMVQNHN

SEQ ID NO: 37 - protein, 324 aa, Lawsonia intracellularis
MNTQSSSNIGDKLKTYRCGWVALIGPPNAGKSTLTNTFVGQKVAIVTSKPQTTRNKIGGILTQDDMQVIFLDTPGICSEKNHVQGQLGKLMLQSAWQGLAIADSIVCVLDGGLYLKKPDLMDRDIEPFVEVLRQEVRPIVIVVNKIDVFHDKSRMLPMLAKLGEYFPTAEIFPISARYKNGTDKLLDTICLKLPEGEAIFPEDQLSTVPVRFMVAEIIREKLFEQLYQEVPYAVAVEVEKWDEESRKNQVVIYAVIYVARASHKAMVIGQAGERIKSIGTMARKEIKALLGKKVHLELWVKVRESWINDNQFLYELGFGTEEIG

SEQ ID NO: 38 - protein, 233 aa, Lawsonia intracellularis
MISEEFLKERLEFLHDQIQQAVVSSGRDKKSVKLIAISKFHPVKTIVNVFNYGQKAFGENYVQEAIYKQSELSGLPIEWHFTGRLQTNKIKNVVGQFEYIHTIDSIKLAKLLSSRLPEDGPSQKILLQVNIGDEPQKAGITVAELPFLAETILSLPKLKLCGLMCLPPITHKGKVVSCYFTKLRELRDRLEVLLDITLPELSMGMSNDYIQAIKEGATLIRIGTSIFGHRLNN

SEQ ID NO: 39 - protein, 489 aa, Lawsonia intracellularis
MLSKDPQFTRQLFTLIQGIEVIPEAIEQISAFCLSPKNKPVNIVLPIPSCFRTTQLNIAMAVCSNSEGTLQHVLLNDPIIECIKAFNQLGASLHWEESGCIICSNPNFTRKHYKKSIQIDTVIHIGNDTLSLYLLIFFIATCPARVKFIGKNSLKLADFSPLRKFLPMIGSRLINIIPGQDGLPIRIESSAILPSEIIIPTDLPVDAVIALFIAATRWDKELLIDIKEHPNVTYILDKIIPLFEQWQIPFQKIIFNKQVTAISITPNKITFPENPMIGTYVPGTATLLALPAFVGGTVTLKRQYQQHTDICLLIEVLTQFGLNITETADTICCTGRQIGLTSSSLNIKTLPKELFPLILTLLCIPLLKSETNLLPELPDYVDESILDSYLAQLGLVRMGSKVKLISPTQTPWTSPSDTWGLAISLAAFLRPQIKLSNPGCVEAIYPNYWKIYNKLPTGDYTMQSSKKYSPTPVELSETKKVNRRRIITE

SEQ ID NO: 40 - protein, 313 aa, Lawsonia intracellularis
MIYIAGSLAYDKIMNFPGKFEEHILADKLHVLNVCFLINGLIEKRGGTAGNIAYTLSLMNEKSYILSSVGTDFENYEKFLSSLKLPLDGIRKIPDTLTAVAYITTDQSNNQITGFYPAAMNFPCLYDLPQLNKMHDWAIISPTNIEDMQKLPTIFYEKQIKYIFDPGQQLPVLSKDDLLNAITGSSILVTNDYEFEMICKKTDKTRAELRSLTGAIITTLGDQGALIHTDKEISIGIAVPNKIMDPTGAGDAFRAGLLKGLIHNLDIVESAYLGSTAASFCIENSGTQEHTFTYTTFSERYKKAFNEYPTLSW

SEQ ID NO: 41 - protein, 488 aa, Lawsonia intracellularis
MQLRSVFFIIGVLLICIGTSIIFPLLTSIYYNDGVAKDLALSLSVVIISGFLLAFICHQNNPIILSNQEGFAVVGLCWIIASIAGSLPYVYIGIPFTDAVFETASGFTTTGATILTDIEAIPKSILLWRSLTHWLGGMGIILLSLAVLPLLGVGGMQLYKAEVPGPSPDKLTPHMQDTAMLLWKVYGIMTLFQIILLYLAGMDLFDAINQTFSTVSTGGFSTKNNSIAAFPTPVIQWIIILFMFASGINFTLHYKLLLGLLPHYTHDTEFNLYTLLLIIGAITIGVLLIFYHIYPSNTLSQIEQIVRASVFQLVSICTTTGFITEDYSKWPQLAQGILLFFMFMGACAGSTAGGLKTMRIIVIAKVAYQEIFRLLHPHSIRFAKLGDKTIQKDVLSGIIGFLILYLFILLINTLALMALNYDLITSFSATLTCLSNVGPGLGSVGPVDNFHHLDNIAKWFLIFCMLLGRLEIYAILILFIPEFWKALK

SEQ ID NO: 42 - protein, 343 aa, Lawsonia intracellularis
MIQLFSPIRHKIENLKIIIVGAGEVGFHIAQRLSEEHKQVIVIDTSQEALRRVQENLDVQTIHGSGSSPSTLKTAGIETTNIFLAVTDSDEINITATLFAYALSPHIINLARIRNEEYASYPELIEKGPLNISMLVNPEEEVVRTIERLLMLPGAVEYGEFDGGRIRLVGIRVIDGPLIDQQLYHFRDIVNNDGIMVAAISRQKKLIIPSGIDTIQKDDIVYFIYKSKNQKELLRVLNKSHGIINVACIIGGGNIGVRLAKAFEQRDIKVKLIDNNEARCKKLADRLNSTLVLYGDGTDKSLLEEEHIDQADAFIAVTSNEEVNILACLLAKIAWRQRSCSKS

SEQ ID NO: 43 - protein, 510 aa, Lawsonia intracellularis
MNVVPILLLILDGYGLAPDSTGNAAKLAFTPNIDRMLAMSGGTQIHASGRAVGLPDGYMGNSEVGHLNIGAGRVVYQQMTRIDVAIENKELDSNPILLDLFTKVKSSNGRLHLLGLLSNGGVHSHIRHLEALLSIAKEHNIQVILHPFMDGRDTGPKDGLKFMKEIVSFLTSTSSGVIGSFCGRFYAMDRDKRWERIKLAWDAIVHGVGLHVEDSVKALEQAYASGETDEFIKPRVMGNSSVNCVQDNDAVLFFNFRADRARELVSAFILPDFNGFDRGRVPHLSGIATMTMYDKEFNIPVLFNHENITKTLGEVVSALGLLQLRIAETEKYAHVTYFFSGGREEVFTGEERILVQSPRDVATYDLKPEMSVMEVTDRLLTAWNSKKFSLIVCNLANPDMVGHTGNIKASISALEAVDNCVGRIEKAVAEQHGCFILTADHGNVEEMLDKSGQPQTAHSCNPVPLIAIYDGKPLNLKESGKLGDIAPTILSIWDVSIPNEMTGNNLLSSE

SEQ ID NO: 44 - protein, 653 aa, Lawsonia intracellularis
MFKHDYTLPMPFREALPWISAVSLLFLCSYMTRSTLAPLLVYVENSLQIGHIQSTSLLLMQSIGYSISLFSCGFLLSKITPAHMVAFSVFFSSICLCLMPYVETLSEARLLFALLGFGCGFYFPAGIAVLSTLVYPSDWGKAISIHEVAANLNFILIPLLAQLFLQVTNWQGVCAYLGWPMLVLSILFIFFGRGGQEHVPLPSYSGYKELLFTPASWAVVILLIIAQAGEYSVFSILQLYLTDEVGFTPGSSNILISSSRLITPFIVILGGWASDRFNVYFIIKFCLILHTLALTAMAFDIPSLSIIGIIFQTISISCLFPSIFKAFAIRFPLSQQALLMSLSMTSSGLISNGGITMFLGYCGEHLTFGIGFICLALYSIGCIWITNLLKHISLLITNDTGTMHLAAGMGIPSLAIFLATAQPYDTGPYLEDCCCLEPSLNCHPCDFDTTCPIDTICRTTISADAIWPLLTYRLTNKKWPEKAPIETSTVARVWITTRDHYGFFNLQSLSGHDKEDRSSWLYIQRYYYRQLIDLLDNPNTTKSYRPLSTKVISQLSQNVRQQASNTLEQISSLLKLLEQQGLLLSEKHISQFGKKFLSTTYNITELLEQNELFTALGIFWKMSIHEHADNLSHVLTIANSFQKIITKWNNSLK

SEQ ID NO: 45 - protein, 364 aa, Lawsonia intracellularis
MRFVDEVTISVSAGKGGNGCVSFRREKFIPKGGPNGGDGGDGGNIIFKADSRLLTLYDFRVQRHYRAQNGEGGKGSQRHGKKGEDLILHLPVGTIIFEQLLDKEYFLVDLDRPGVEFLIARGGRGGKGNEHFKSSTMRTPRFAQKGEMGEEKYLRLELKILADAGIIGLPNAGKSTLISKLSAAQPKIAAYPFTTLNPNLGVMIDNLDPDKRLVLADIPGLIEGACKGQGLGHQFLKHIERTRFLIHVLSSEDIDEDNPWLGFDIVNEELKEFDHTLMQRTQLLVVNKIDVLQPEKLSHIKQVAESSGKIIYFISAETGEGIELLVDAIWKLQSYRLNAPFIHLKPIEHKSDEEFAIEVAYTKE

SEQ ID NO: 46 - protein, 308 aa, Lawsonia intracellularis
MIDMLFSLLYSGYGEAKCIYIYIVLLIFFPSILLAKEFDGEKIFFMKNQSPQQQILSIALLTKNKKIIIFDGGTKADSNHLSSFINEHGGKVSAWFLTHLHDDHTGALSEILLDDNITIDNIYYNFPPPEWVEEHEPMYSSHLTMIVEPLKKMAYLNNQKKIQKGDTFSIDGVTITVLNDFDLSITRNGVNNTSFVYDVMIAGKRMLVLGDLGEEGGERLLAEYGNTLKADIVQMSHHGQRGVQKEVYTAISPRICLWPTPLFLWENDCSYGPSSGTWEINKVKTWMEEVGVRVHYVSGLQEDDIVIE

SEQ ID NO: 47 - protein, 316 aa, Lawsonia intracellularis
MLPILATNAFVDHIQYQLCPGAEKLLEFYNHSSEDIYYGPNQMVIPIDAHLVHRGDGVFETLSIMEYHILQLKEHIKRIVTSSKKLKLSLPCSTSKLKKLIMTVAKAVNKNEGNIRVLIGRGLGGFSISSLEYPNSSLYIVVYNTTQLLESWYKNGLTACKSNILSNPILFLTNIKTVSYILGILMELEAIEQKVNLTLSFNEQWCFTKSAIANIAIVSQDNTLIFLEFQNILIETILEKTIEALKPSVLIELQCITEQELLTAKKILVLGTTHLCIGITKYNGHIIGNGTTGPISNMLRNMLKKTLLKHGIPINH

SEQ ID NO: 48 - protein, 364 aa, Lawsonia intracellularis
MQVLLLDLGLELRGGQRQVYYLAQELQHSDVVPFIACPKASALAVVCKKERIPFIPLLGRSPANPLILFQLEKALRKLSINIIHTNDAHSAALGAFSKALHGNNILLMHSRRVSYPLHTGSRMKKYLLADSIVTVSEEIRKRVIQSGIEPNKVSTIHSCIDPSLYYPKKDRKDGRFVFQSIGALTSQKGYSNLLQAMHIIKKAKDLPPWEVRIAGSGELFQSLLNEAFELNVASQLALLGQQDSRVILPLADAVVVPSVEGEGSNATIKEGWATGIPVIASNLESNAELIQDEINGLLVPVNDPVALAMAMIRCMQEPRLCEKIVSEGTKSLENFTTTTMVKQYLQLYRNLFPMRTIPQQQKAS

SEQ ID NO: 49 - protein, 470 aa, Lawsonia intracellularis
  misc_feature (20)..(22): Xaa can be any naturally occurring amino acid
  misc_feature (26)..(26): Xaa can be any naturally occurring amino acid
  misc_feature (28)..(28): Xaa can be any naturally occurring amino acid
  misc_feature (30)..(32): Xaa can be any naturally occurring amino acid
  misc_feature (34)..(37): Xaa can be any naturally occurring amino acid
  misc_feature (41)..(43): Xaa can be any naturally occurring amino acid
  misc_feature (46)..(46): Xaa can be any naturally occurring amino acid
MSIFYNNSLNCILPNRIRLXXXILFXSXHXXXHXXXXHLGXXXSWXFTPRLLKTSIDFTSMEMQLGDTPIPSFSFHGPKPSQPQVPCYITWTNEYTHDVIRSGMDRSPMFTGVITGTGARYCPSIEDKVARFADRDRHQIFVEPEGLTSQECYINGISTSLPLDIQLALIATIPGLENAHMVRPGYAIEYDYVDPMQLHPTLETKVLPGLWLAGQINGTSGYEEAAGQGLWAALNVFCKITRQEPFILGRDNAYLAVLVDDLVTQGTKEPYRMFTSRAEYRLLLREANADIRLTPLGRKIGLVGDYQWNLFQKKISDIDTLVNRLQNIRIKPDTLDPSIFLELGESIPNRAYTLEELLKRPSITFQTLRKIYSDLPITSEDVYLETETIIKYAGYLDRQEELVQRSAKLEHSYLPKEIDYTKVAGLSSEVIEKLQIVRPQTLGQAGRISGVTPAAITCLEIYLKKIHAFR

SEQ ID NO: 50 - protein, 340 aa, Lawsonia intracellularis
  misc_feature (316)..(316): Xaa can be any naturally occurring amino acid
MLKFFDGRKQIILTGLQLTAKNIYPQSTGKISIHTQALFQPENISFVTEGNVSIILDKNILSIEHIKFIINPKTGLTVSTPITIEGNGRYLFDKNLLEKSDIQVKLDQFKINANGSLELNKLQGTAVINASGSLKKLASTLGMMLITPETKIFENFSAQSKVQVNGQYIQLTDLKIMLDDSQVTGKLALNLPNKLSGNLSLTTINLDQYLPISFAKHTPVTKNLIQTSSVTTAQHTIKNTQQQTISSSLPTLDLKLTADSIIISKLHIEKLNSQLHGNPSNYVLDPCTFIFYESPISVKGKGNLTASNPRYEATIXGSHINLTSLLSDISKTAIIKKRYC

SEQ ID NO: 51 - protein, 459 aa, Lawsonia intracellularis
MKRLLLCIITCVIVSSCSFAPDYNRPHLELPEVWVSSPETGVPASMQWWKRFNDSTLDILVAEALQHNRDLIAAVARVDYAQAQLGVARSDLFPHFSGNAQATPVWVDHKRVTDGQSPYSANFSASWEIDIWGKIRNAKDAAFSQLMATEAEKEGVFLSIAAQTANAYFLLRSLDLQCSIAERTVKTREDALSIYTAQYQKGFINKLDLTRAKTEVETARTALYQKRIAQENAETALSVLLGRSPRLIMDTAIERGVSMKDLSCIPVIPQGIPSELLERRPDIRQAEYTLKATSANIGVARAAWLPSISLTGLFGIVSPHLSDLLKNPLKTWSYGETGTVPILDFGQVYYNVEAAQAKEREALANYEKTVQNAFKDIHDALIRQYESKNIVNSLERMVKELRIAVHLARTLYDNGYTSYLDVLDAERALFQSELDLASAWSDRLSSIVQVCLALGGSWE

SEQ ID NO: 52 - protein, 443 aa, Lawsonia intracellularis
MIDRYTRKEMGRIWTLNNRYQTWLRVELAVCLAWNKLGVISDDAFKTIQERAVIDVNRILEIESITHHDVIAFLTALEEQIGPEARFIHLGCTSSDIVDTATSLLLIEAGELILKGFDKLLTSIESLALKHQGLLCMGRTHGVHAEPTTFALKFANFFAEIQRDKERFVQAFNGIHVGKFSGAVGTYTFLTPEVETIACDILGLKPDTISTQVIQRDRHAEYFTALAITAGSIERLCVELRHLQRTEVREVEEGFQKGQKGSSAMPHKKNPISAENMTGLSRLIRGNVLAALENQALWHERDISHSSVERVIMPDTTILMDYIFHRLSGILDELIVLPENIECNMQASFGLFYSQRILNALIESGMGRQEAYVSVQRNAMQSWETKQPFQEVIMDDTNIVSCLGQEMLEKLFDTSFYLRYEKVILGRIFGESTLQKYQANKKN

SEQ ID NO: 53 - protein, 305 aa, Lawsonia intracellularis
MNTKSSMLSLILMHDIKLIIILKSTYIYGYYMAQVNALVITGYGTNSHNETAHAIRLAGADYVDIKHFSEVVAAEVFLDSYQLLVFPGGFLDGDDLGAAQAAAQRWRYLSDKNGVSLLTSLKNFIAKGGLVLGICNGFQLLVKLGMLPSLDGKLFDRQVSLSHNDSARFEDRWVSLRVNQDSPCVFTRGLSEKNLLSMPVRHGEGKCIVREPSILQQLIDGQHIVLQYADPTTGEATQEYPYNPNGSPFAIAGLTDTSGRIFGLMPHPEAFHHRTNHPGWPRGEQTILGTIIFQNAVDFCRTIDK

SEQ ID NO: 54 - protein, 491 aa, Lawsonia intracellularis
MFLLFERMSKKEPIILSFEKAKRMQLFDQLEDLQEKNGIIKGRIVRRIKGGYTIDLRGVEAFLPGSHVDLRPVPDMDMLVNQEYEFRVLKINRRRSNVIVSRRVLLEEERDSKRQDLLQTISEGQVVVGKVKNVTEYGVFVDLGGLDGLLHITDMSWKRIRHPREMVNLGQELELKVLSFDKENQKVSLGLKQLVPDPWQDITERFPETSHHVGKVTNLVDYGVFVELESGVEGLVHISEMSWTRKLRHPSQMVHQGDEVEVVILGIDQDKKRISLGMKQVKPNPWELVGEKYPEGTILEGVVKNITEFGMFIGIEDGIDGLIHVSDISWTKKVRHPNELFKVGDTVQAKVLTVDQENEKFTLGIKQLTEDPWSNAPSVYPVGGIVKGIITNITDFGLFVEVEEGIEGLVHVSELSSKKIKSPSEIYKDGEEIQAKIIHVSAEERRLGLSIKQLKEDEEHRKSREYSRTGPDSGQSLGDLLKMKLEEPTEN

SEQ ID NO: 55 - protein, 304 aa, Lawsonia intracellularis
MLYTWIIATRPWSFTAALIPISLGTALAWSGTVKTPGVPFHFFCFLLILLSGLLLQAGTNLLNTYGDFISGVDTLDSAVTCPQLVRGILLPEKVKQVGIALLVLSVILGLILYLLSGWPILLFGVIGLIGSATYTTGSSPYKYKGLGPIFVFFLMGPCMVLPAYYVQADVLTWSSFFASLPISFLVTAIMHANDLRDIQHDKLANISTVAIWLELKSSLVLYRILCLGAFVSLIFVVAFGLVPITGILPLALTPYLNSKLKRLRASEIDNELIVLEGWTAQFHFLFGVFYVVGVLLWGIIQVIL

SEQ ID NO: 56 - protein, 327 aa, Lawsonia intracellularis
MQQQYLVKQTEYLLQVTDLSVQFNLDTPITILQHIQFCLNKGKTLCLVGESGCGKTMTALALLKLLPEYGRIISGQILFNNKELTQLSEAEIREKRGKDIGMIFQEPMTSLNPVIRVGDQIAEPLIQHLHFSKKDALHKAIELLKIVGISSPEKRILDYPHQLSGGIRQRIMIAMALSCSPSLLIADEPTTALDVTIQRQLLVLLRQLIEKHQMSMLLITHNLGVVAEMADEVCVMYAGEVIENASVYDLFKKPAHPYTQALMNAIPLLKKGKLRLESIPGTVPALGKLPIGCNFRPRCPLAHERCIIKPPSTYIGNNHNVSCWLYN

SEQ ID NO: 57 - protein, 425 aa, Lawsonia intracellularis
MMKPIILIVDDDDVHRSMLSALLKGWGYETDEASDGDIAITKAKEHAYDTILSDLKMARVDGIKMLECILNYNPSIPIIIMTAWSSVETAVQALRMGAYDYLTKPLDFDALKKTLQKALTHLQVHPIVRDNESFHKVNTKIEQSNLGILGRSPCMLELIQMVSTVAPSEATILIVGESGTGKELVARAIRQASHRSDAPFVTVNCAALSPALLESELFGHEKGAFTGADRRREGRFKQADGGTLFLDEIGELPLLLQAKLLRAIQQGEIQRVGSDTPITVNVRVIAATNRDLPEEVIAGRFREDLYYRLNVIGIEVPPLRNRIEDIPLLATFFLEKFALSNRKVIKGFTPQSMDVLLRYNWPGNVRELENAIERAVILTTGDYISERELPMVMTSPSQPNVLSSQSDKEIVQYKDTVKHLSQEQP

SEQ ID NO: 58 - protein, 567 aa, Lawsonia intracellularis
MLFWALSTSIASCIFQHTYLYKKLSIDTKLWFWILYLSIMAFFGLLLITWNNPFILLDIKPIDGNGLNPLLQNPGMIFHPPLLFLGYGWFTIPGCLALAQTISNQKEEPSWIVISKPFILSAWAFLTAGIVLGGWWAYMELGWGGYWAWDPVENASLIPWLISTAALHTIIIQTHKNVLTHINVFLMALTTLSTFFATYLVRSGIVQSVHAFGTSNVGKPLLIFITFATITIISIFYTAYSTKDNSELSTINSRIGFLIFTSWLLLALAILILLATMWPVFTSFWNQIILGQSILQSSTSINQESAGSIGLTSDFYNKTCLPLFAILMALLSLCPWLGWTRGIHNLKNITLVLITFFTSSCIMYLSGYQLPIAILGASSAFAIMTSTVLLVLDKQTRSNKPMLLAYGIHFGVALIAMGIAFSGPYKIEIEQILHEGETIKVGNFDIKLIKIQEGELVDYAYIEGLLEVRKDGKFIDFIAPQRRIYKKWGKMQFAEADTIPSLGNELYASLLAVDHQNRALFRLSSMPLVNWIWIGGAIISLLPFFSIISSYRGKNYASSANSYQQSI

SEQ ID NO: 59 - protein, 323 aa, Lawsonia intracellularis
MTLKKIIPNLQKTQNNNNNNSISSPLLPHTVQEYFASNYYCRYVWCKGKSTALHVFEDLQLVTADGIPPSLVTSMIHTVQSSSLEHVQGLALGINQHRIHTMQELEHTFQEMRSQHIYFTLLYLEADMPTLIKRYAATRRPHPLEQYHIGLEHALEEEAKRLIPIRQTADIVLDTTTYSIHDLRRFLQKSWNPYPEKIRSIKINIISFGFKYGVPNEADLLFDLRFLPNPYFVEELRPLSGMDKKVATYVLNSASGIKFKKHLIRFLSFLLPLYDAEGRYRITIALGCTGGKHRSVAISELLLHELTKKNYTVSIEHRHMELG

SEQ ID NO: 60 - protein, 473 aa, Lawsonia intracellularis
MGLELKQQLKLSQQLVMTPQLQQAIRLLQLSRVELAETIQKELLENPFLEESQEEIASERQETRTEHDPSEAYDQDVSNTADWEDYLGEFASTPKQLQSREYELSEEMSSLEARYASRPTLESHLMWQLRLSTLTDEQKNLGEAIIGNLSSSGYLQASLEEIANSEHTDIEKLKPVLHAIQRFDPVGVAAQSPQECLLIQIEVLGYDRDPILVELIQNHLDDLEAHRYKPLLRKLHITMEELKEYIDIIQTLDPLPGASYGEGDPTYVSPDAFVYQVDNEFIILLNDEGLPNLHLNQAYEHILEESSDKDKEYFSEKIRSAAWLIKSLHQRQRTLYKVVESIVKYQQTFFKEGITKLRPLILKDIADDIGMHESTVSRITTNKYIATPFGIFELKFFFNSALGVDDGSQVGSESVKAIIKKCINEEDPKNPLSDERIGEILKEQLKVNIARRTVAKYRMSMDIPSSSRRKVHF

SEQ ID NO: 61 - protein, 307 aa, Lawsonia intracellularis
MKILTHAQLEDEGFFFDSGFRGWISSHHTLLNTKGEPDHTDKHTLENLEILCSYMNQEVPNILTEIQGVRSIFPEVKKSCLEAKQHNFGVSVRYGDPQFMSAGGTLSSRVHFIYEVQQQVAKGIYDYINEIYLFGIGGRKIYGLLNYPTLFQPIAPLPTGENSSPLWSKKDVEQWYKDIDELYKTLQRQTFNHVTLETPTVLCISAQLDTYLGQKHTKKLLQQMVNETYPRLQFVTIDGLSISGIGESMLLIAKELHGKKTGEFVYSERLRTYPVIPGKEELTQKWSASTYGCVIHIPEAIAYMRGL

SEQ ID NO: 62 - protein, 372 aa, Lawsonia intracellularis
MSPRKLHVLHITSRADFGGGPEHVYQILRHSPGQWNNFVACPLDRPYAERYKNLLGINGICFIPHRKFSVKTLWDLRQFIKKNAIDLIHSHGKGAGVYSRLLHVLTNIPCVHTYHGSNINSYSAVKSKLYRLYEQLMGNVTQRAIVVSPSEQEYVLQEKLIPTERLTYIPNGVVFPEKIDTEEKHERFQIISITRFDKYKNTEFVIPILHRLKEEQQIHQVQLVLIGDGPERKVLEERLKSEDLSQYVIFTGNVLSSAPYLQKANVYLSTSCWEGMPLGVLEAMSYGLPVVASDVKGNCDAVEHEETGFLYPYNNAYEASKALICLMNSPKMVKQFSQAARERVRKFYSIQQMIASLMLLYDDIAKQQYLSL

SEQ ID NO: 63 - protein, 455 aa, Lawsonia intracellularis
MMNGGGKGFTEWTNVCRSKPMFEGHIQPNYPHPDIGFYDLSNIEVLRKQVAMAKQHGIYGFCFHHYWFAGKRLMEKPVDMLLKHSELDIPFCLNWANENWTRRWDGEDQKVLIAQTHSPEDDIAFMKDLLRYFKDPRYIRINNRPVLQLYHASLLPDLKATVKRWEAVCKEHGEEKPYLMLVQSFRNIDPQDYDFDAAVQFPPHLPSWNFPIDIGLKGLHKRFKGRIRHYSMFAEAVVKDYTTKYTLYPCVFPGWDNTPRRLYFSSIFACSTPQAYRQWLTDACTFASTTHEKDNRFVFINAWNEWAEGAHLEPNKAYGYAYLNATSRVVENFAVPPSTAENNPHKVLVVGHDAFLAGAQRLLLETLQWIKRNTNIDCRLLLLGDGVLLDEYMQSVPVMLCSADTLQLSKLEDFCGGIPDVFRYTAVQLKYITCFLHGMFLLFSSVHLEAALQTF

SEQ ID NO: 64 - protein, 378 aa, Lawsonia intracellularis
MKMYLQHYFNPDFDYLQLQPIVSVKGQADLYNLGYVQNVVKGQVIAEMIPLEAIENPIPRFVLEQEKFPQGPNTYIDPAYPHYLLSDVNGYVFYYNGKISVKKVLNVRSNVDFHTGNIAFVGDVMVHKDVKAGFQLQANTIIINGMVEGGEVRSRKDMKIIGGARGGVSNRCLLSSGGSLHVNFTEKVELRSKKRMIVERFCMQCKVYAEESFIVSGLVAGGIIQVSKHVFIKEKLGNTSGIPTHIFLGYNPFLLRKLESCDNSLGILSEKITNYKTIIDQSSSSTDEIHQKLEEVVQQHNQLSKYRNTIWKLLQLDEAKAFSCRLVVPGIVYPGVELSIGNASFSVKEELNNVCFRLHENEIIYESVPATLLPFFLK

SEQ ID NO: 65 - protein, 567 aa, Lawsonia intracellularis
MNKYIQYDENGDIIDIIIQIQDRSISMLGSGGKIREKKIASHFITALQKAEMSSKVLPVLLGSGAGYALKEILENTTSPIAVIDKEFFLNDTQLKEKITDQRINWICSSNIEEVFSALTHWQIQHGRLPLYPLVHPFYFRIDKPWYQKIKQYVAASTRFDFWSKAIRPRFSTAEPRLLLITTRYFLLGVIEEACNRLGIPHQIITIQDEETGCVEFVEQLLTSVATFHPDFILTINHFGVDKEGILVDLLAKLELPMASWFVDNPHLIIHEYGEVVSPWTAIFTWDENTLHSLKEYGYPHVFYLPLGTSQYRFRPRMPQDKPLSSVFPTHLSFVGNSMVYKVEEQIEKGNFPSILLQHYKNIASDFIYSDKRSIQQFLKETYPEYYKEYLKLPDVEQRLAYEAMLTWESTLQYRFSCVEQLLSFQPVIVGDNGWYELLSNYKDNWSYCPSVNYYNTLPSIYRFSDINFNSTSKQMKGAVNQRVFDIPATGSFLITDWQQQMDTLFEPNKEVVYYREVGEIRELVQYYLTHPNQRKSIASAARQRVLAEHTWEHRLQTLLEHMRQTYG

SEQ ID NO: 66 - protein, 426 aa, Lawsonia intracellularis
MAETVFNEFIFYETLIDLCESIAWEKPVDENKLFTLTKHGAAPTQVMRLAEAFGLMLVKVEAKNLQQAKLINDLQLQNKELESTKKILAEQNTHLSRTIQENYQSQKIIGQCDEMHKVLELAKAIARYPINTLILGPTGSGKEVIAKMIHYSSPRSAGPFIAVNCTAIPDTLFESEMFGIEKGVATGVNYRKGLIEEADKGTLFLDELADMSLANQAKLLRVLEEKEVVRVGSSKPIPIDIKIIAATNVNLEQSVKEGKFREDLYYRINVVEIKLPPLASRGDDILLLAQNFLNYHCSQLHRPALTLSHDVQKKFLAYSWPGNVRELNNEMERVAALTIGDTVESSDLSQRIIKEWEENTQDIQENLTTPSETSQRQDSLNLQQMEYNLIIRVLKQTNGNKSKAAELLGITREGLRKKLLRLKIFD

SEQ ID NO: 67 - protein, 608 aa, Lawsonia intracellularis
MQKGDVMGITLRTKLFLLVIVSISMAAIPIIFSAYEDFRSSNIELERKTFRSITSFVKDGLEARYFDILTYQATNTLQSKNQLRRIAMMLDSNLNILEKFPSKEQSTFLQEWIKQLQQLNIHIEVYNANKKPLVNDPLFTTLKTKYNLKDAKNRSFESLLNYEQLPINGEFTVFENKNSSKSDPILVFLLPSPEDQHIILTAINISDISKNALDAEEQLAKTIREKIEGFDLHKDGFIAVFDSDGTLIAHKGNNIGKKIDFISEKTLEEARNKSMSEEVISLSKDEKLLLHVAYFKSLNWYIVAAAPQSEIEAPTRALIHQLVGIALAAILNSLLVTLILTARLITPLQTLTEKALSLAEIDFSSPEAEELATADLPIERSDEVGQLSRAFSMMGKTLTQNIRELMETTTIKERMLGEISAARDIQMGILPTTDTASLVPHYDISAFLDPAKAVGGDFYDFFTSPEGKQVVVIGDVSGKGIPAALFMSMTVTLIRYAIGKGLSPAEVAKEINEVLRKNNPSYMFVTLFIGIFDPESGILEFVNCGHCLPYIINSTTDKPITTLDNSHQSPIVGVLEHAEYVNNQTQLHKNDICFLYTDGVTESNGPKS

SEQ ID NO: 68 - protein, 350 aa, Lawsonia intracellularis
MRYFNFHNLARQLIISPKFFLIICSFIYLTYILLLPLVHANNDTNNNLNTDLTFSPEETSTGIITDRVTPLLDWILDQSGQLTINQVLSPEVQRTFSSFLFTDLPKQEGTFWFRFVIDSTNRLSSSDFILDLSKRTPTQFPEPTQVWVVSMGSGKATLINPIKDNSYPIKYSGAEVLEVYIKLPGAPGVGFTPVLWTKKSFSTFYASMHVAILFLLAITIAICLIRAFTEKQEWRIWAALYSGSILISTLWGLPPTPKGILTIWDIPGLLAPGIALFILPHIGRRLMNTRQVSPHIDIQLLLLTLPGLVLSILPLIPGYLWTLPGTPDTIPNSAVKPSIADDTAYLCVGK

SEQ ID NO: 69 - protein, 360 aa, Lawsonia intracellularis
  misc_feature (213)..(213): Xaa can be any naturally occurring amino acid
MSGDSGDKTEPPTPKKLREAREQGDVAKSQDVAAAMTMFGASLYFIGMWQDVFSNLLNLIELPTKFIHLPFEEALPATISGIASIAFSILIPIIATLMFLAVAADLMQIGVLFSVKSAIPKLDNLNPKKWFSKVFSIKNLGEFVKNILKVSVLTITVWIILSNYIKELFAIASGNIWSLWYILGSVLRDLTLSVSMVFSVIACIDFMFQKWQXNKRQMMSKQEIKQEYKDMEGDPLIKGKRKQLHQEMAMQNPVNKVRKAKVVVVNPIHYAIAIDYEKGRTLLPVILAKGEGLLAQRMVAVAQEEGIPVMQNIPLAHSLFMDGIEDSYIPRNLIAPVAEVLRWVNSLNKNMIHKPISNDT

SEQ ID NO: 70 - protein, 700 aa, Lawsonia intracellularis
MSLFAKAQSTVGVITRNNDITMVLLLVTVIALMIIPLPTPLVDTLIGINMGLSFLIVMMCMYVKTVLDFSVFPTMLLFTTLFRVGLNITTTRLILLQADAGEIIFIFGEFALGGNFVVGAVVFVILTIVQFLVIAKGAERVAEVGARFTLDAMPGKQMSIDADMRAGVIDMEEAQKRRARINQESQMYGAMDGAMKFVKGDSIAGMIIAVVNIVGGTIIGVTQHGMAASDALHVYGILTIGDGLVSQIPSLLISIAAGILITRTGDSAENVGSQIGEQIFNQPKALLMAGGVVFLIALVPGFPKIQLFAISATLAGIGYTLKLIMTNPAPKNAKQSIAKTLEPTTSPSKKSSTEQKESKEEFSPTVPIILDISQQMSEELDYDSLNDELITLRRVLYFDLGVPFPGINLRISSKLHDLTYSLMINEIPITKGTLEKGMVLARDTKENLAMLGVEPEEKEKFLPDVESLWVPDSKKALLERAGITCMTHSRILAYHLSLVLSRHASNFLGMQETKYLLDKMEERAPDLVRETTRLLPVQRIAEIFQRLVQEQISIRDLRSILEALIEWSPKEKDTVMLTEYVRSALKRQISYMYSKGQNMLPAVLLDPNVEETIRKSVRQTSAGAFLALDPETTQIFMASLKEFASETNLTYTQKPVLITSMDIRRYVRRLIEGDYYNLPVVSYQELTPEISVQPVGRIRF

SEQ ID NO: 71 - protein, 305 aa, Lawsonia intracellularis
MAYQYWYNKKHPEKTLFLSFEGAYHGDTFGTMSIGSSGFHNIFSSFFFNVLRIPYPDTWDGDNEIEKKEAHALHVLDKYLLEYKNTIAAIVIEPLIQAARGMRICRPAFLNSIIKKVRNAGILVIFDEVMTGFGRTGTYFAFEKLDVIPDFLCLSKGLTGGFLPLALTITTDEIYNAFLHEEWKYALAHGHSFTANPLGCAAALASLKLLLHEKTTLAMQSIHQAHIDGISFLQKSCSNVTKTRVLGTISAFELHDTTHIKQIESSFLANGLLLRPLHNVIYIIPPYSTNYKELMDAYNKICKIL

SEQ ID NO: 72 - protein, 336 aa, Lawsonia intracellularis
MNVLVTGAAGFIGFHLCRRLLDEGHSVVGIDNLNDYYSVTLKKDRLALLMDEPNFTFSSIDIVNLPNLQELFLQYRFSHVVNLAAQAGVRYSIENPSSYIQSNLVGFGNILECCRHTEVEHLVFASSSSVYGLNTLMPFSVHQGTNHPISLYGASKKANELMAHAYSHLYNLPSTGLRFFTVYGPWGRPDMALFLFTKAILSGEPISVFNEGRMRRDFTYIDDIIEGVIRVMKKTPKINENWNSHSPDPSSSKAPWKIYNIGNNNTVQLSEFIEVLEVELGKKAIKEYLPMQPGDVEATWADIDDLKHDVDFSPNTPIEYGIKKFVEWYKSYYLIA

SEQ ID NO: 73 - protein, 772 aa, Lawsonia intracellularis
MKGIILAGGSGTRLYPITRGVCKQLIPIFDKPMVYYPLSILMQAGIREICFITTPHHQQDFINLFGDGSQLGLQLTYIKQSFPNGLAEAFILARNFIAGEPCCLVLGDNLFHGDKLYCMLEDCTGLEYGGKVFAYRVKDPERYGIVSFDENNKVLTIEEKPQNPKSHYAVTGLYFYDGDVSNKAASLKPSARGELEITDLNNIYLQDSGLSVEIFGRGVAWLDTGTFESMHQAAAFVQAVQERQGAKVGCIEEIAWRKGYIDDVQLKKLAEPMHKNEYGEYLFSLRILKERKHGNKFCLWTAADQRALGMFQQQSDDEDDLTHVDSSSDEDSNSSSDEYESCDEEFFDAVEDLSTAGLQDESEAPARGIVLSTQGNKEGAKDSTTDGGQQSSEVKYSSLKLMGQSACKVKADFIPGYNLGGHISSLIGMQGILLDISDQVSIILKTLPLKAYEFSDDEIDNFSLNRKNALVFLTGRKRLHRLYPTFSKKEKVHFPLYRTFFTVEGYKTNLEYKTRLGQAGIIIDSCSDMCIGLSYYHQANEMKKYGEVRLGSGIGSSKAKTELEAISAMMVWNPNKKGITGHIVSFYGWGSIKNTRSFTHMDGELHVKGNPEAYLMGGLLQVGYTIFQSNTLSVTPYIELMASTVGWNAFKEFSGLLPCEVSRNTERKVEKRIGIRSHWKTTNTSQLQTWMSAVLGTQHTNSISSKPIIALTDKYKASVPGYKRNYTRFECGFVYSMKLSERLEMNLSGLTHIMNTKRYTEQNINLQWTYFY

SEQ ID NO: 74 - protein, 597 aa, Lawsonia intracellularis
MIKEYFIYTYKIIYIYNMLKEGIERLMGNYRYIFKQQEFYNKCIIKNILRKSVAVTILPFFLLVTSVNAFAMPGFSRNNGFNPLTNSDSESSTPSISSSSMFRNMCRRGNPCPYLTVGCIIGGVLGTVAGVLFSNMFTFPHSSERVGAVVTGTIGGCFVGFCAGLGIYYCSKRSSCVHENPTPEDGIPFYITLGDNTREANLCECSGSCECPLLAPSQRPFGSHQTDSHRGSGNRTSSCFLPGYNRDGQTSSLLGMQCILASSSEHVLMNLKALTLKAHEYSQESMGNMEDNYFPLQKKWLSGPSRGFISTFKNYKPSFISYRVFASMDNYQSNLEFKVRSGSAGVVTELFPGISVGLAYNRHTDTRKEYGGIQLNTGSGIVQSRSKTEALSAVVALNPETKGFTGHIASYYGWGKMQNNRSVTHGYSETTSKGKPDMSLTGLVGQVGYNIPIAKSVTLTPYVEYMYTMVKWDAYQELSGILPCEISGNKEQIIEKSIGLRSHWEVTSGSQLQTWVAGISGSHKKSGLHSRPLATSMPSYKAAVPVNKKQYTRTEVGLSYVVNITDMLEIGCNGILRFKQAKKIDSQYLALQAQYRY

SEQ ID NO: 75 - protein, 425 aa, Lawsonia intracellularis
MKCYQTTCNHRTENTDGEQSSDSEDENETSSQIALRVITTQPSSIGISNPAVITRQPDSRDTASSYYSGFLSEFNPKSHIRSLLGMQSALLDISEQTASALRQVVLKTHEHMLMSEMMYQQEGYVYSKGQKFQYPSCVAKVTDSLFLKRYVHHFVTFDSYETNFEHRLGSGQAGIVVDMTSGVYLGLVYRRHNNHGEMYSGIPNNSWTEMIKVRTNTESLSTGLAFNIGRTGITGHLVSCYGWGKAKNIRSFMHGTMEVCSKGSPDIRIAGGLVQLGYNLSVSKQVRFTPYIETTCSVVQCGPYKESLSLFSCELTKNKEQVIEKSIGICSYWKPSDMLQVQLWIAAVSGYRDVKRLSCNIVNSRLKQEISVPLKQTRYKKTDVGLSYLINITPRFCLEMNGMMSFENIKKSKEKQLKLFFTYNY

SEQ ID NO: 76 - protein, 610 aa, Lawsonia intracellularis
MYYNSYYIFIFIFCSTYEVVAMHNSEKGLSNTPSLSISSFLKRNWEKAKVTCGGVLGSSVGITTLTTGFTLSAIGAVSRGLGTSSRVACLSLGLATAGSCVLGILSKKEELQKIKLERQKEKQRGDQAWVNLQNVKMIQLLDDIEKRKDEDPNRDREQIERIQLVAAELRNASFFIRESGFDLGIWDENDEDWYIQGGVYKMVPPPGKFWDPYEYPDVFEEESATSQEEYTGGKYTSEVVPQLKPVRIVSCPASIPGYSEASHMSSLIGIQQALFSTSEQISTMLKLLGLKAQENVCTPETQLEGSFYSKIQKFQGPVKHIQEETQIKTLGLSIFNIFANIDSYKTNLEHKVRSGQAGVLIDVISGLSCGLTYDCHKGDTREYKGILLEKGSGEVKTKTDTEALSAVIVANTNNAGFTGQLISSYGWGKVKNIRSFTHANREVNTKGLPNIRFAGELIQVGYNVLVSKHVVITSYVETVFSLVKWVPYKEVSGPLPCKLSENKEQVIEKSIGLRSHWQATSMSQIQIWIAGVSGYIETNSIKCEPIQKHASRYKVSVPKNESSYKRTELGISYTANLTNNLEFGINSVIRFENSKKFGGQQMILSLRYVY

SEQ ID NO: 77 - protein, 1321 aa, Lawsonia intracellularis
MNNGENDGRQHSLRRNSLGQPYDSECSGNGSGGEEPTSDPQSEALFAAFLNAHGGDTLADVSSSFSCPCFGPTKRCCKSVFEKWCCMFTCISSSIGSLVGGGVGCCIELVSKLGNIAPTAIPTTITTTGFSVSAAPIAYGLAGCIVCGPLGCICGYCTRQGNTLDRIENRMVRLRVLSAIRSNIREEQGPYVAFNVRSQSVTTQPRPVGSSDSTGSPVVTSQPPRGSMSSVGGSYTPVEQQRGEEGSSSEGSDEESGDEHIYETIGGGTGGGGGDEEPIYEEIGFYTTNLIPGYSYEGQVSSLLGMQCVLTGVSIQFPQKLRRLALKAYEKIPEMYLSTRGNKASSSSVPSYGQLLKVVKDPAKQKQSHIPYHVFAFTDDYKANLECKVRSSQTGVIAELCTGVHFGLIYSRHNDEKKEYTGMQLDVGRGSVKAKSEIESIAAVVTFNADRPGITGHFASCYGWGTVKNKRFFTHAGRETSSSGSPAISITGGLVQIGYNLYISKSCLVTPYVEGVLSVATCEPYNEKRGVLPCKLSESNESIFGKSIGLRSNWKLSEDTVLQMWISGISGTQTSSNISLQPLVAPMKRYEVSVPMRNENYLRTECGATYILKITDSHRASLVQKAYVYAAAAHEGQLRLSGEPYLSHPLAVAEMLSEMGFDAYAIMAALLHDTVEDTKCSLEDIETEFGKQVADIVNGVTKISMMSFESKEEQQAENFRKMILAMSQDIRVPIVKLADRLHNMRTLNFQKPHKRQSIAQETMDIYAPLANRLGLHRIKLELEDLSFKYLHPDIYTQISTWMHSNRVVERNLIERIISKIKAILHKNGLKGTVQGRVKHVYSIHKKMVEQHLTLDSMHDILAFRVIVDTISDCYAVLGLLHSQWKPLHGRFKDYISMPKVNGYQSLHTTVMGPEGERIEIQIRTNEMHKLAEQGVASHWLYKERNHSVNLSDVPQFEWLREVLDRQKDEKDSLEFMQSLRLELFKDEVYVFTPAGDVKELPKGATPLDFAFLIHTEIGNHCVGSRVNGKLVPLYSVLKSGDTVEIITDKNRYPSRDWLKIVKTAKARNRIQQYLRTEEKAAAISLGRELLEKEGRKLGISLTKAEKEGHLISLATHLSLGSVDELLASVGYARNTPRYTLKRLQTLMSSDETSSYSKVIAPHKKKKESSVLQNFSGVTVRGIDNMLVRFAKCCNPVPGDSIVGFISRGRGVIVHTETCPNVQALESDRLVSVQWDGHETVPFPARIYLVGINVVGLLADIALVFKAENVNVESCIVQRLIDGRSEMDATIGVRDIAHLYQVIDKLRQLPNIVEVLRKTADE

SEQ ID NO: 78 - protein, 404 aa, Lawsonia intracellularis
  misc_feature (308)..(308): Xaa can be any naturally occurring amino acid
MNPLESIDSCITCSICTINCPVIAATKKFKGPKLTGPSAERFRLKQQKEIEGLSYCSNCKCCDISCPSNVKISSLNMLARAEYYRTRRPPFRDWLLAHAPFLAKLIKWIPYQLQLIGMKSPITRWLLDKIGIDRRASIPFFAPTYFPKLYSKYKKKQKGHYTKKVVFFPGCYINYYEPQTGMDFVAIMEKANYEVILPKVRCCNLPLISNGYYSEGKKVAHHNSKILQQYAEQNIPIVTMCPSCALTLKQEYAELFPEMIDQVTSFSRNIEDACEFIIKLIESKELQINVTLHSTKLLYHTACHLKAXGIGKPGFELLQRLPGANIEDAEAGCCGISGSYGFKKDKYDIATSIGNNLFDIIKKSGALFTLSECGTCRLQMYHHTGVEALHPLTLLHRILKQTPQ

SEQ ID NO: 79 - protein, 417 aa, Lawsonia intracellularis
MNRKVDLIVVGGGLSGMTAAAFAARKGKKCILITKGNGTITIGSGTIDVLGYLPNGKPVSNPFEAVTFLPKRHPYQLIGELTVRNALKNFSELVGEENVIYKTRSQKNTYVVTAAGTIKPTWMVTESMDMSIIPDIKNICILGIEGMKDFYPELIIKGLSSKKYFANKTFTQAKLHFPESERNISTFNVAQYLETENGLKWLVQGIKQQGNQSDLIILPPILGTTFLPHLLHKLEQKSNCLIRECDVLPPTITGYRLNILLRYILKKYHVTIIDNAAVTSAEVKDNHCISVITTQNSNIRKYEATHFIIATGGIISNGILTKHNRAWEPIFNIDLPANPSSPDWANKELYPKIKKSHLFSMIGPTVDSFLRPTDSDGNPICDNVFFIGNTLNGYDSAYEKSGNGVAISTAYFASLNV

SEQ ID NO: 80 - protein, 543 aa, Lawsonia intracellularis
MMKALSFYKNQHWDVIVIGGGATGVGTLRDLSMRGLKTLLLEQQDLAYGTTSRFHGLLHSGARYVMKDQGVATDCAKENIILSKICKPCIENIGGLFIRTNEDDPEFEKNWVTACNNCKIKTTPISITDALKEAPTLSKHILSAYKVPDASIDGFKLVWHNVISAQKYGGEFRTYTKVTSITNSNGVVTGVTIEDFWTKEITHLTCNFVINAAGSWCGDVAAKAGIELHLTPNKGALIVFNHRLSKKIINRLHPPSDGDIFVPHESTTILGTTSKNTNRPDDIIPEQSDILELLNIGSVLFPKIHQYRILRSFAGTRPLYSMYKSPKELYASRSFRIIDHKNEGLSGMASICGGKVTTYRLMAEQISNVVCNYFNNNVPCNTAKEPLITEVDPTLHKKIKYFPIQGFEPALSRLGNSINEVSTAIKNNLLKKDLICECEMVTFAEVEYIASQPSSYLLGDISRRTRMGMGTCQGTFCALRAIGNFLQFNLLSSKEPITDLLQTFQQKKWVGIYPSLWGESLREVELFRQIYSATLNIEQENHE

SEQ ID NO: 81 - protein, 333 aa, Lawsonia intracellularis
MLTAKVEKSQLASDEYSWSKKAKSPAQEDNTEEKLEKSQNNNNQKVNILENSSSSTEGTVQSKLTETPIVEAPIEETVNSIHSKLNFKGPDAWPKEKALSTLDKLEEVLNKNKLMQQPETRDSLQPLSKTNEEKPVSEPVVVYVDEKGNPVGKPPDTTAIIEEAKKNMRAGQVQKAKDLLATLKGHALVQEQHEEVLYLFSELNEKIYKDRWIEGYEPIITSTNKAMNFNLRSPRVAEALMRLGMVNLRIGNQDEAAGYFGALRRKFPQSEFIPEAYLALGKDQFSKGEYADAVKTFQLILDNYPESKAVQDASRFMAEALFKQGHYSRALIQ

SEQ ID NO: 82 - protein, 492 aa, Lawsonia intracellularis
  misc_feature (175)..(175): Xaa can be any naturally occurring amino acid
MMKQHILFLAPSHIITRIFPELRDSGIEVSLAENINSASAAIKKSRPDIIISRPTLPGYKVEELFNIAKEDPKFPPIVVTTDKGTTEEAERLMTLGAQDYWLEPLSTEKIKTVLQKSYKLTPLPSKSTLDGHKPEDLSSAPTIIGSNPAIRRVLALAKQVAPSKASVLISGESGXGKEMFARTLHAWSNRSKGPFIAVNCAALPEHLLESELFGHEKGSFTGAIARKLGKFELASGGTILLDEISEMDLALQSKLLRVLQEGEIDRVGGTETIKVDVRVLATTNRDMEKWVDEGKFRQDLFFRLNVIPLRLPSLAERGDDILELANFFINMYTKEYHLKPTKLSQEATTWLKNHNWPGNVRELQNLMERAVLLAGGGLITPNHFLLETEEWPLFDEVPLEQQTESIIPEVITISNTTQALQTHPQSKSTTATTTSSVFPNAVIPLHEMERLMIIKGLEATSGNRTQAAELLGISIRTLRNKLNEYKEQGFTI

SEQ ID NO: 83 - protein, 537 aa, Lawsonia intracellularis
MKCNQCEQTAANDSCTNIGVCGKTDNVSHLQDVLIYALRRLAHAALSARAKGIIVPEIDFFTVQALFITLTNVNFDPNVIERFIEQAIINRKTFAQLRGCKIDNSTRPIEEVKSMMSMPTGIDDFHKDKNNCSAMQMLLYGLKGTSAYAYHAAVLGKDDPNLYEFIYEGLAAGFPDREGNIDKERTLSDWMDLVLRCGKSNLRAMELLESGNVESFGVPTSTKVSLGQKKGKAILVSGHDLKDLYDLLCQTEGTGINIYTHGEMLPAHGYPKLHAFTHLVGHYGTAWQNQHKEISLFPGPVLFTTNCIQNPKEYIENVFTSGVTGWPGVQHCKDGDYSKLIERAKELPGFSEDVPGKELLTGFGKQSLLDAAPVILDSIKSGVLQHIFLVGGCDGAKPGRNYYSEFVEKAPDNTVVLTLGCGKFRFFDKDLGMIGSLPRLIDMGQCNDAYAALQVVTALAEILDCGVNDLPVSLVLSWYEQKAVSILLTLLAAGVKGIRLGPSLPSFVSEDILQLLVKEWGIAPITTPDKDIALLMQ

SEQ ID NO: 84 - protein, 319 aa, Lawsonia intracellularis
MAQTNILLETGTNELEIVEFYIDEPDYRGYYGINVAKVVEIIREQPVTAMPEMRHPSVMGAFLYRNGRVVPLIDLSVYLGGAPIKNTDSRVIITEFNMVMNSFIVSGVNRIHRLSWLDIEPPGKFIQTMSQSSITGVVKMDDRVVFILDLEAIVAELHPSLAIRMDETSDHDVPEHPYKILHADDSASIRKLIYSLLGKEGRFEVTQAVDGQGAWDLLMKYRDEAIAEDRPITDFIEGVITDIEMPNLDGLTLCKQIKEDSVLKVIPVAVFSSLINNSLIAKCKKVGADAQFAKPDLQSLSDSMYSLIKSKELELSRKI

SEQ ID NO: 85 - protein, 338 aa, Lawsonia intracellularis
MSKTRIAINGFGRIGRQTFKAIYTMYKEQLEVVAVNDLYDTNTNFHLLEYDTNYGRANLNANINGNTVIIGDWTIQCLAEKDPTNLPWASLGVDIVIESTGIFKTADQARVHLNNGAKKVIITAPTKGEDIMIVMGVNQDMYDPTKDNIISNASCTTNCLAPIALVLEKHFGIESGTMTTVHSYTNDQRILDLPHKDLRRARAAACNIIPTSTGAAQAVAKVIPELKGKFTGWSLRVPTPTVSIVDFTAILKKNSDTETIRKALEEASNTYLKGIMAYNRTPLVSMDFKGDSHSSIVEEEYTIVQTDNLAKVISWYDNEWGYSCRVADLSNFLRTKGL

SEQ ID NO: 86 - protein, 445 aa, Lawsonia intracellularis
MSSRLSKYFSKHSIYLLQPYPHMARTILGSGLISLLTAVILSTGYISYQLISTTLHFFQPDKITSLESPKKTLSTLKIPKGQSYRESFLHTDLPYQEKATTSLTNRIRQTDFALMQTFIRLDIHKDRVYPLLTKYYHNKNETYRFQQIKIFLPHSVEYFVTNLQENLEAWADEIKLRACSEHIYKLSINEITTHELIFIPTGEKFIQCPIDEKPRITIVIDDIGESIEAANQLIKLDFPITLSILPHTHYAKSIAMLTHSTGNEVLIHQPMESIQSPYVSAGPGEIHTKMSAEEISNILCKNIEKIPYASGLNNHMGSCFTCNEKGNHTVCKILASKGLFVLDSKTHPSSSFYNIAKGKGLPAYYRTHFIDHGHHTESSILNQLKKAEKYAIEKGQAIVIGHPYPETISALKKWISLRDTSIHIVPLRYQPIYIETVKSDYFSKK

SEQ ID NO: 87 - protein, 442 aa, Lawsonia intracellularis
MRVWLRVAALILTGSILFIGGSCVIAAVSDSDKFDALKRFSQVLDIVERYYVKEVPRKELVDGALKGMLQSLDPHSTLLTEEEFKEMQEATSGEFCGIGIEITQENNHLTVVAPIDDTPADKAGIKAGDYILAVNGRPTSEMSLQEAASLIRGPKKTEVELTILHKDAKEPTTIKIKRETIPLISIKSRELEPGYYWVRISRFSERTTSELNEVLKAASKKGPIQGIVLDLRSNPGGLLEQAISVTDVFLKEGTIVSIRGRMEESSKEFKATNNTSDITAPIVVLVNAGSASASEIVAGALGDHKRALIVGERTFGKGSVQNIVPLADETGLKLTVALYYTPSGRSIQAEGIQPDIELPFDPNPVATQTQNPLHMMREQDLRKHLEKNTSNTKEEKNTKNNQKSEQNKKEPLPEVKEFLNKDNQLRMGLQLVKTLPKFRQIQ

SEQ ID NO: 88 - protein, 784 aa, Lawsonia intracellularis
MLHSNLILLELTVSKQQTLNFIVKGMSCTSCSSRLERTLGNIPEIQSVTVSLNNSMATVIPIPEANIKKLIQEVISETEKTGFIANYLAEDLAEQKTWILQQESISHYLEELKQRLIIEFFFTILVLFISMGPMWGVPVPVFVNPKTYPLNNAIAQLLLTIPVIWSGRYFYLIGFSRLWKMSPNMDTLVALSTSAAIIYSIWSTIEISFGNYYTEPSLYYETAVVLITLISLGKYFEMLSRFRMSDAISRLMNLVPETALRLSSLSDQEESFEEVPLSNIKVGDIVQVRPGSKVPVDGKILKGSSSINTSMLTGESMPVFVTVGDKVIGGTINLSGMFLMHAEKVGLNTALAHIIRLVREAQGSKAPISRITDQISLIFVPVVIAIALVSGLTWLLLGDTSIADSIRIVMTVLVISCPCALGLATPMSIMIATGRGAQLGLLIKSGAALEYAADLDTIVFDKTGTLTEGKPHLIHTVPLKTMPDNELLRITASLEAVSEHPLADAIVRAAHKHGLVLYPVINFMSYPGRGVRGELQVKTESITVLVGNKTFLEEHHISLDNKVGITTLEEFAGQSFISLLVAINGQFSGIIAVTDPIREESNSVTEQLQHMGIRTIMLTGDSKQTAQIVANHLHLNEVIADVMPEGKAYAIQELKNKGFRVGMVGDGINDAPALAKADVGIAIGSGIDIAIETSDIVLLNSLSTNHPLSGLVSALLLSRATLRNIRQNLFWAFGYNIICIPIAAGILKLFGGPLLSPMLAGLAMALSSISVVLNALRLKKFTPS

SEQ ID NO: 89 - protein, 433 aa, Lawsonia intracellularis
MLLCQFFISITDVWAAGQLGSEVQASIGIIAQAQMLLLSLVMAASSGAVASISQSLGAKKYIRAQRYIGLVVFSCLILGVCLTILGVIFQVPFLEFVQTPESIFSMALIFFEFYLLALPGQYMLTIGSAVFRAVKSVYIPLYVAIIIGILNFIGDMAFGLGWWGWPSYGAIGIAWTTFISVSFGGVVILFLLFYNHWLTRYSFPPWCWIKKGSMYLLQVAGPSLATAAIWQTGYLVLFIIAGTLPSEGVATLAGLTAGIRIEAILFLPGIAFSMTSAILVGYALGLGNKQEAKHVLLMVVFVACLSMSFLGAMLWPWRDTLAAFLSSDPLVRQEIVSYLSYNILCVPFTIASIVLAGGLNGAGASIYPMIIFGCSIWGIRLPLAWFLSHFLWETSSGVYMALLVSQVVQSMLLLWIVLRYNWARFSMYNSMSK

SEQ ID NO: 90 - protein, 404 aa, Lawsonia intracellularis
  misc_feature (206)..(206): Xaa can be any naturally occurring amino acid
MLIRNSTELFTAMLDRKTIILGDEGELQTKEKTLGSRLKPQPARVAPELTAKQSEAVQLSMAKLVEYEARSSFGRANLPYPMPLGGKSYEETLHKARLTLGNKMIEFVAEKELKDEPKAIRQGVIPYLQALWQEEHPEGPIDIYEIQTIVKDILTELKKDPGKPLSQLAYGFILGPTELQEHMLYLEQKIGRAIELTWDDKHQHEXDENGIYDIFTRDAPRDRPYFQNVKLSYEKYSNEDALEKYKEMLIKEFPERSIAAVVGICMSQTIMADFSAMIMNVNTPFPLNPYCEKNSQDISRIMTLVTSNTDPLPEETLDEELDEDLKVQEIPLRGAEGGGQLQELPREEKPTAFTTSEQVELAEEAEESSSEEEPSTSSVTRKPLSLREQLIKTCTNKNITHNAF

SEQ ID NO: 91 - protein, 325 aa, Lawsonia intracellularis
MNKILAQDEVDALLRGLSGGEIESETDIPEDDSGIVPFDLANQDRIIRGRMPVLEIVNDRFARLCTNALSNAIRKRVELNPISIDMTKFGDFMRSLPVPTSINIFKMDPLRGNAIIVVDSRLVFALVENVFGGIGSQPKIEGREFTRIEQVIVDRIIKIALDNMEESWRPVHDVKLELIRSEINPQFAAIVPPSDVVIVINFEVELDSSIGSMTICIPYATIEPIRSKLHASFQTERLEIDHAWVGRLKERLLETPVELKVRMGNTQITGNQLLRLKIGDVLVLDTDVEDLLECTVAGVTKYWGIAGTVKSNKAYQIIKEEEPHC

SEQ ID NO: 92 - protein, 300 aa, Lawsonia intracellularis
MIEFFQQIINGVAIGGIYALVALGYTMVYGVLKLINFAHGELFTIGAYIGFTLLFSLGLSTLAEPIAIGLVMFTIFVIVAFLGVLLERTAYRPLRKANRLSAVVSALGASIFLQNAIMLIYGGNFYVYPETFFPSLSLDIFGVHISFMRLIIISISFFLMVTLYFFVNKTSIGMAIKAVAIDQITARLMGINVNKIISLVFFIGAGLGGIAGVMVGMYYGQISFTMGWLYGLKAFTAAILGGIGNIPGAMLGGLLLGVVETLAASYLSIGWKDAVAFFILIIILVVRPTGLLGERVADKL

SEQ ID NO: 93 - protein, 328 aa, Lawsonia intracellularis
MSRIRRYCSLLLGVCIAILPLFLNNYWIDVASNVGLYVLLALSLNVILGQTGIFHMGHSAFYAVGAYFTAICNTYYQIPILWLLPLAGFTTAFFALIIVRPILSLRGDYLLIVSIGIVEIVRIALTNDICGITGGANGIFGISRPTIGDIVIRTTTQFYYLIWGIVLLTMLLFSWLFSSRYGRAFNSIKEDEVAAEGSGINIIHYKWLAFVVGAFWAGIAGNLFASKMTVISPTSFTIWESVIIFVIVILSGGSQLGVILGTCFVIALPEIFRSLADARMLIFGLAMMIMMIVRPQGLLPPLPRVYNIRNLLHKKHSDFGSPIAPRQN

SEQ ID NO: 94 - protein, 433 aa, Lawsonia intracellularis
MNELTPREIVVELDKYIIGQEQAKRMVAIAVRNRWRRQQLQEGLRDEVAPRNIIMIGPTGVGKTEIARRLAKLCHAPFIKVEATKYTEVGYVGRDVESMIRDLMEISINLVRKEEAEKVRERAEVLAEERLLDLLLPIGENRDATREKLRSLFRQGHLKDREVDIEVQEQTQPIGILNVPGMEQIGNQMKDAFSRIFPQKTHRRKMKVSAAWEHLVGEESNRLVDNDKLTDLARERVEQMGIVFIDEIDKLASASQHRSSDISREGVQRDLLPIVEGSAVNTKYGLIKTDHILFIAAGAFHLSKPSDLIPELQGRFPLRAELEALGKNEFYRILTEPDNALTRQYEALLETEGVKIVFTDDGLKEISAFAEDVNTQTENIGARRLHTIMEKILADISFDAPEKFGTTLEVTKEYVVSYLEDIRANTELSRFIL

SEQ ID NO: 95 - protein, 643 aa, Lawsonia intracellularis
MQVGHVPLYLLDTDIPQNILDDRRITARLYESDRDCRIRQEILLGMGGVRLLNLLKIMPSIYHMNEGHSAFMILERIRNLMLWFNLPFNTAQECVRGNTVFTTHTPVDAGNERFDPSLMEKYFSDYAKSVNLTWNDFMSLGRFSTNDRNMFEMTLLAIRNANKVNGVSRLHSQVSKHMWANNWKGLPVPEIPIGYVTNGVHIASYVGEHTRKLLKKYVHELWDSLPTSHEAWKNVAQIPDEELWKARLEQKQPLLNVIKHLAMSSNLSYKIFAEEQQSIIQQLSEDVLIIGFARRFAPYKRANLILANPDRLHHILNNPQKPTILVFAGKAHPADQQGIDLIKQVINYTKDPRFYGKIFFIENYNLAIAKILLQGCDVWLNTPRRPYEACGTSGQKVGANGGLNLSIADGWWCEGYNSHNGWTIGKEIVDILPESEQCDYSDAESLYSLLEESVLPLYFKKDTNSFSPSWIAMVKNAMQTLIPEFNAERMLHQYLDDYYLPLAKNQVTFRGDNFAIPKQITKWKQGLEQRFATIKIRNVQIEGLTEDTVLYGEPLTITVTLSPESMKVDELLVQLVIGPGKDNTFTEMPDVLTLMVSQQSGKEVTFSGVYNIKYNGPNVYGIRILPTMPGLLSPYETGLILWV

SEQ ID NO: 96 - protein, 826 aa, Lawsonia intracellularis
MQSGEHDVARAYVLYREKRAAMRNTSEKKAVLHLVDKGEKKVLDHTWLMNICHVACKNLTSVSSISIFNNTLKSLYDGMSLADVYSSLILSARTMIEYEPEYNKVTARLLRLSLAYEVLDQSTELMDLHQLKIATISYFPKFIELGINAGLLDPRLSTFNYSYLAQALVPERDELFGYIGIQTLYDRYFLHIKKRRIELPQLFFMRVAMGLALNEKKKEDKAIEFYNLLSNFDFMSSTPTLFNSGTIRPQLSSCFLTTINDDLENIFQSIKENALLQKYAGGIGNDWTPVRALGSPIKGTNGQSQGVIPFMKVANDTALAVNQGGKRKGAVCAYLETWHLDIEDFLDLRKNTGDDRRRTHDMNTANWVPDLFMKRVLENSDWTLFSPNDVPELHEKFGLEFEKFYTHYEAKTLTGEITLFKKVSAVQLWRKMLTMLFETGHPWITFKDACNLRSPQQHIGVIHSSNLCTEITLNTSKEEIAVCNLGSINLSSHLINGEVDQNKLSQTIATALRMLDNVIDINYYNSPKASYANLQHRPIGIGIMGFADCLYKLGIPYASHQAVEFADRSMEIVCYYTYWASTELAKERGAYSTFPGSLWDRKILPLDSLDLLLKERGGFLEVDRSSRLDWDALKDRIAKYGMRNSNCVSLAPTATISNIIGVSQGIEPAYQNLYVKSNMSGEFTIVNEYLVNDLKKLNLWDEAMVADLKYFDGSVAYIDRVPDSLKKLYATAFEIDPVWLIEAASRRQKWIDQAQSLNLYLDTPSGKKMDEIYKLAWLRGLKTTYYLRSLGASQVEKVGTNSQSVLKKDTVLRACSIDDPECEACQ

SEQ ID NO: 97 - protein, 381 aa, Lawsonia intracellularis
MSTLKKTNSLNWDTHNSIETNTGISHPQDGVNSLRKISESLQDSVTLPMPVNASDKRIVNGKTDINQLLPFRYPWAWDFFLKANQNHWTPLEISMSQDVYDYNHTLTTNERHVFDNVLAYLTTSDILAMRNIGLAVMEKMTAPELQIYQARQVYEEALHTWTYQHCIESLGLEQSEIYNRYRVVPEIYGKILLSNKRLEQVLRSDINLSDKDNLHEFIMSYIFFAAIFEGCWFYNGFSPIFSLQRRGLMKGTAEQFQYILRDEVLHCTFGITVIKGLIEEENITLDPTAVRQLWDEVEAAEIAYANYILHEPIIGYNADLHIGQFRFIANRRSRQLGMKEPFPGAKNVLPWLDEQSNLRKEKNFFETRVTEYQTGGGLKWD

SEQ ID NO: 98 - protein, 441 aa, Lawsonia intracellularis
MAQLCDTIIHAHCIVTQNKERVILYNGSLAITSGNIVALGPKEEICSFWDAKETLDLCNMLVMPGLINAHTHVAMTFFRGLADDLPLMEWLKSYIFPIERHLTPETVRWSSLLGYAEMLRTGTTACLDMYFFEDVVFEAAIKAGIRCTGGESIFVFPSVSCDTAKTALEHTKKMAELYSDNTRINVVVNPHSVYTTTPQVLSQCIEVAEECSLPLHIHLSETTTETQICLQKYGLRPVSYCRDLGILTPRTTLAHVVDVNLEELTCLAEHGCVISHNPSSNMKLASGVSPIPEMIKRNLSVGLGTDGAASNNCLNMFMEMGRCALLHKVYWNNPTALFAQTVLDMATLGGAAAIHQPKLGVLAPGHPADLIALDMSMPNLQPMFNPISHLIYATTGMEVFLTMVEGEILYYNGTFTRFDYDSLSNEMKKVSHWVKEKLQLL

SEQ ID NO: 99 - protein, 379 aa, Lawsonia intracellularis
  misc_feature (176)..(176): Xaa can be any naturally occurring amino acid
MEVAISRHKNKNIFLGNKQKLLRYRIEVLKARVEGNPDPPIPILTPQVLELPLLPDPPPSPPPLPQQTFQFPDFGDPLPEPLSPLGDDPPQNVLNQEPQPGPSSEIVSTLQPSPSVEDLSSSGVTLECQEELSSSDEEILDDECLTSGDESSTSDGESQRSSPPTKRRKLTHTPPXSDRGSPPGSSSMLMPYYTYGQVSSLQGLQSTLMSLEDQLATQLRLSIIRSINVLGVCCKDDNQLQPHTFQSKKQTKIKGGIGRSHSTDNEIRPTSVNNSLFFSQQWHVIASMDSRISNLETTISSRQAGVFTTPIDGLCLSLLYSNNKKKTQNFYGVVLDSVDGSAKAQIETDNILATVTWNKEHQGFSGHLAGCYGDIKIVF

SEQ ID NO: 100 - protein, 389 aa, Lawsonia intracellularis
MEFIDLASQQKRIRTVIESRIQALLDHGKYIMGPEVKELEGQLAAFTGSKHCISCASGTDALLMALMAHEIDAGDAIFVPAFTFFATAEMPALLGATVVFVDIDPFTFTMCPNQLKKAILAVKHQDPSIYPLPVTALETELTPRAVIPVDLFGQAADYTRILNIAKQFNLYSIEDAAQSFGATYKDQSTCNLGCDCAVTSFFPAKPLGCYGDGGAIFTNNDKLAGILKSIRVHGKGQHKYENVRIGVNGRLDTLQAAILLAKLDVFPNELCTRQTVATWYTKELTGVKDITLPHIAPGNFSVFAQFSIRIGSDMRDIAAIYLAEKDIPTNIYYPKPLHIQPAFADQYYEAEDMPISTTCSHDILSLPFHPYMTQDDVKLVCNTLKEVLS

SEQ ID NO: 101 - protein, 423 aa, Lawsonia intracellularis
MSSLFLYNAYYDGKLVSLEVRDGKIITLKEGEQNSTSSPIDLHPVDAKQKHLFPSFIDVHTHLREPGYEWKETIATGLAAAAHGGFGSVLCMANTNPVNDSATVTCKILESGKYAFPNGPYVYPIGAATIGLKGEQLSPMHELAEAGCIAISNDGLPIKNTELFRRILEYASDLGLIVIDHCEDPYLACDTHMNEGFISGKLGLSGQPDIAETLQAIRSILLAEYLNVPVHIAHVSAKRTVEAISWGKSRGVKVTAETCPHYLLLDERAVIGYNTNAKVNPPLRTQEDIMALREAIKTGIIDMLATDHAPHAAYEKEVPFDKAPNGFTGFDVAIPVMYSLVREGVLSESDLIRLWSNNPAGVFNLPINNFKPGDPANFFLFDPELEWTVSKENLYSKSWNTPWLGETLKGRVVMHWINGVKVV

SEQ ID NO: 102 - protein, 321 aa, Lawsonia intracellularis
MHYIITGVAGFIGSTLAEKLLSIGHQVTGIDNFSTGKHTFLNKAKQHERFTLIEGDLLDTKALSKAFATGEQVIHLSANADVRFGVEHPSKDLEQNAIATHNVLEAMRLHNIKRIAFASTGSVYGEASIIPTPEDAPFPIQTSLYAASKLSGEGFIEAYCESFDFIGHIFRFVSILGPRYTHGHVFDFCNQLRKDPSKLTVLGNGTQRKSYLHVDDCIDAMLLAIEKAPTDTKVHIYNLGVDSYCTVKDSIGWICSSLGVTPTVQFGEGDRGWIGDNPFIYLATEKIRSLGWTPKYTIEESVKTTVSWLMENTWVFDNKEK

SEQ ID NO: 103 - protein, 332 aa, Lawsonia intracellularis
MLYYHVAEFIYQHYVPYKNIHGFEVWAAKESRFSQETSQVEVEEQVTVDVPIVTQGQYFGHNANVTTNNNTIHIDYGPYLPMVKPSIINLMTATNMSPIEIAPYKTCKCELEITNVLQGTLQLSFSFDHQPYTSESSCYIFIPAYKEKTKVQLTKILPEGAKAITDIRITAPDHTYMDIYSFSMTLLNTYPCTLLIVTQIDQHNYGPYLWANYDPYHGLSNNTVLATFTKDIKIHPSETYHIVIPSYIKDDIAEYLHFRILSPNGGYLVGNVQDIDNHSGEFRFALKESTEPIDYLLRISSQYAWKNKQQFSLTSHSIYPIHIESICAIKGD

SEQ ID NO: 104 - protein, 458 aa, Lawsonia intracellularis
MPSSYLSGLSKFFPFPEKRNDSFCVFITAIAIALLSTFLFYTSQSFELMAFPDRIHGGGIFNGHNAFKRPTLYFTLLGIFFIIFSCIVSLLSIIIQQFTDLYKRDVILFEKHTLISVSSILIISIPMVLINEPLYEIQYDLFKALTLGVFLIVTLRWLLCINERYTISEKLRLTPAAFGFFFLFSGIYLSSKALRYPLDGLLNTRMGYLHNILYFFLLGWIVSILDKKHRFLKSCTPLLLLPLTFIIASETQYILLTHGYEVSLQSILFYFTIVLCAITVFLFLTTKKHISISYNKVMKYWYFPLCIITLTVFMLWQPSLNIDDDLLHPANSFEPAQQLIQFGKIPFVDTWITRGLRDSLPCTLFMLLAGEQHTVDSFIWFQVFSYLTYLIILYCTFTKIVRPAYAFFLTFFFAQVLVEYSGWYNSLMLLPLIFLPWAMRNITFIRSACIWLLAATVL

SEQ ID NO: 105 - protein, 384 aa, Lawsonia intracellularis
MTPINSFYHTLCKWPPNQIQNMFNSVTESQVSHTLNLAERGLSLSIEHLLILLSPTATSFLEKMASIAQEQTIRYFGKTIQLFTPLYLSNFCINNCKYCSFSATNRIKRIQLTIEEIEKEAAAIAATGLRHILLLTGDAPSKATIAYLKEAIQCLNNYFPSVGIEIYAIEKKEYELLECTGVDSMTLFQETYNEKRYMALHTKGTKQNFRFRLEAQSRAASAGIRFITLGALLGLDHWWRDIFYVGLHANWLQNEYPGVDLTISVPRIRPHEGYFSDYYPVSDKNLVQAIQAIRLFLPTSGIILSTREKPSLRDRLISLSVTKMSAGVSTAVGGHTDHHIAKDNIAQFEIADTRSVEQIITAIKAKGYQPIFKNWIKLSNAPMH

SEQ ID NO: 106 - protein, 394 aa, Lawsonia intracellularis
MSFNTGEFEYSGPPPGNSSSLWLKLLLIIFVIFICVIGFIGYQIFSFLDTPGSTPGKEIEIAIPPGTKFHVLSLYLQDIGAITDVNKFEILAKWKGMSDKVKSGRFLINTGWTPQALLDYLVTGSPLLNRITIPEGLPWWEVGKRLEKAGFVRFEDFKTVIHDPEFLRYWGIPFHNAEGFLFPDTYLLARPFKQNVESAKIIVGRLIDTFWRKTAPLWPNGMRPSFRNASVIKQPLILASIIEKETHFPGERRKVSGVYTNRLAVGMPLYADPTVIYGLGENFDGKLRRSQLQDKNNPYNTYVNKGLPPGPIASPGLDSIRAALNPEEHNYYYFVARGDGSHVFSTNLDSHNRMVKIYQLPLRKGDTGSLIHGGVAPSKVQEDLLPLKETVPPS

SEQ ID NO: 107 - protein, 691 aa, Lawsonia intracellularis
MFLSFSIVIACGLYALYYAYTTSKQVFSADIGTEEMQQIAGAIQEGAQAYLNRQYRTIAIVGIIITILLAIFFSFLVALGFVIGAFLSGLTGFIGMNVSVRANVRTTEAARSGLAPALNIAFKAGAITGMLVVGLGLLGVALYYGLLSMFGVDQKSILEALVALSFGASLISIFARLGGGIFTKGADVGADLVGKVEAGIPEDDPRNPAVIADNVGDNVGDCAGMAADLFETYAVTVVASMLLAAIYFTGKLQSIMMMYPLLIGGVCIIGSIIGTKYVRLTKDNKIMKALYRGLIATGITSAILITLVTTLLFWDVPTMSAQGKSFGIINLLSCSFAGLIITALLVWVTEYYTSTVFRPVRSIAYASTTGHGTNIIQGLAIAMESTALPVLIICAGIVFTYANAGLFGISIAATTMLALAGMIVALDAYGPVTDNAGGIAEMSNLPSEVRTVTDALDAVGNTTKAVTKGYAIGSAGLAALVLFACYTEELGRFFPSLNIHFSLQDPYVLIGLLIGGLLPYLFGSLGMMAVGRAGAEVVVEVRRQFSSIPGIMEGTGKPDYSSAVDMLTKAAIKEMILPSILPVFAPIIIYCIIYWIGGQNAALSTLGAMLMGTIVTGLFVAISMTSGGGAWDNAKKYIEDGHHGGKGSEAHKAAVTGDTVGDPYKDTAGPAINPMIKIINIVALLLLQALA

SEQ ID NO: 108 - protein, 797 aa, Lawsonia intracellularis
MGGGNLYQRVSAEPASSEALTFSSNWGILPTEILVEKIIGNILGVNLDGNIKITKKDYLINGDIIAEVQSWKDIANILQIPIRGSASIKIQFDPKNQQCISTQWQLKNFILGNNFNVTTIKGRADTIQLHKNPTIALSSKIGAGTYEDFQWTQGTLDIKGTLKNFNSKINIAGQTTVNANFQTNLFEKNINITTLNLKNIQKNIGIKLLQPIKIIVSPQQFVLNNCSLAILPSGTITTDIYVTPQRLNANAIIKEVSLLSFQPFSILLPQGNINGHITLTGIPSKPKGTLSFDILNIHYPRPNPSIANLHVEGEIISSPNNICKLNATLTEKKEPIPISIQATLPFEFTENNIPMLSKMRPFSAHIKWTGILDTLWKLIPLTDYIMAGNGSLDASLSGTLDSPTYAIITTLSNANFQDLSLGLYLENINAKLQVFSNRISHIQATASDGKQGSIQLIGNIGSSKEHFPLSINGSFTNLAPLQRKDLSLTLSGAATLEGTLKQSEVKGDIVINQGEFQLTEGLTSNIPTLNVVDSTQQQNTKTKKATYQQPTLSIALSIPNRFFVRSSMFESEWGGNLTINKVITSPVITGALTSIRGNFNLLGKQFSLAKSTISFSGSVPPNPLLNISLTYSSPSITAIGIIKGTTSNPNITFSSTPPLPQDEIVSQVLFGKSSQSLSRIQAIQLAQELANLTGFNTGSMNFLTNIRQTLGLDILSLGTTSNRKANTSNSNDQIEDIPVIELGKYITDTVYVGVEQSYLDSNDTGARISVELAPNFNLEGRTGTQYSEIGINWKKDY

SEQ ID NO: 109 - protein, 447 aa, Lawsonia intracellularis
  misc_feature (420)..(420): Xaa can be any naturally occurring amino acid
  misc_feature (429)..(429): Xaa can be any naturally occurring amino acid
MSRGNTYRSLGILIILLLVCLCHPALSAMQIDIYGPGQNIVHVAMARPIISPGVLATDLGIDLDRAIRNNLSYLPFMRLTDEKAILNGSSLEGYQPPNIDFKRFQLAGSDLLITVGWPKGDHSDSSVELRLYETYSGKFVFGTAYSGVVKSEISNIADKFCADLMKTLTGSGDFFLSTLAFVKQGNGKNVRDVWLVKPTGKELRQITDISGTAMSPSWSIDGRFIVFTHLDDRSHALGVWDRLTNKIQRIRFPGNTVIGPVFMPDNKVAVSLSTGKYPDIFLLDHTFQKEKVLEESPAINVSPSFDAKGTKMAFCSNRLSNPQIFMKDFSSGQVSRVSRQGCYNTEPTMSPDGTLIAFSRLTDDGNRIFVQDLLTGIERQVTFGPGNDEQPSFAPDSYFIAFTSTRSGKKQIYLITRHGXDAKQIPTGXGDASFPRWGKITVANKAR

SEQ ID NO: 110 - protein, 317 aa, Lawsonia intracellularis
MRFISYIASLILHIGLILIIVFWPTKTIVRPERPIQISLTMESIGGGRLPSPVLGQQIPVPTKTSTVTPSIPIENIPVLKNPSVQTSSDFVPLRQETIGGHESQNQLQPIAVPVREEIAVNERIEQKIPTEKILDTPKAKQELAKKVEKMQPKGEPAKKIVKKTEPIGGSASLKDALLDAKKKTNIQKSQKVSPNTSVTNALAGFKKQTSTVGGGGGVSDGNGGGGGLHDIYAGLVMMSVRPNWSIPTYSRDNLVALVHVRIDADGNVLSCVIERSSGRSDFDASAVNAVIRTKILPPPPTPAQQDMIIVFNSLEVQ

SEQ ID NO: 111 - protein, 342 aa, Lawsonia intracellularis
MKNIAVWNTAFLGDTVLTLPLIQTLAKTYPEASIDFYVRKGNGSLFSSHPNIKNIIEYNKKQQFIKSTIKLIQHIKKQNYDLWINAHTSIRSSIITLCSNAKLRIGYSENIIQPLCCTQLIKRKLGSLDEIERLLDLLSNLPIKKSNIQYWPNIVLTQDAQQQANTFWRKYILGPVLGINPGSVWPTKRWLPERFAAILHRAIKKNIHVLLFGGPGEEQLASEIISLSGMTGHPLLHNLCGTLTLQELAAFIKKLNCYLTNDSGPMHIAWSQHTPVTAIFGPTVKCLGFSPRGEHSTVIEISLYCRPCSLHGGKTCPEKHFRCMKDITIDVVWENIEKKLFL

SEQ ID NO: 112 - protein, 336 aa, Lawsonia intracellularis
MATFFFFPPLPSITGGMYVILTIAKHLHTIGHKSTLVFREYSPYIDSITPQIPTTHWDKLTLSKDDVWVVPEGWPMALIPGLRSQSRCVVYVQNWAYLHGKLPDNASWEQLPVTMIAVSNPVAFFIKETTGINAHILRPGINLNIFHVPTCKSFKSQNRPIRIAWMPRKNKALAHQIQQSIKAKLSSCNSSTSLEWIEIHKKTPEEVSACLKTSDIFLATGFPEGCPLPPLEALACGCLVVGFGGFGGWDYMRQALPNGYTPWWPLENLPWGGNGLYVADADILGTIFALEYAIDLLHSHNEELNSIYLQAEKTVKEYSLNNHYNAVSNLWEQHFI

SEQ ID NO: 113 - protein, 621 aa, Lawsonia intracellularis
  misc_feature (57)..(57): Xaa can be any naturally occurring amino acid
  misc_feature (62)..(62): Xaa can be any naturally occurring amino acid
MERPHPSSIPTTPGVYLYKDSQGRIIYVGKARNLRKRVLSYFRDGLVITPKTKAMMXHANLXETISTNTEKEALLLEASLIKKHRPRYNIVLRDDKQYLLFRIQKGIPFPRLEIVRQSYKDNAVYFGPFTSGTSVRDTWKFIHKIFPLRRCSDKVFNNRIRPCLYFYLQQCLAPCTEEVDPKDYAVLIQKVELFLSGKSKELVELLQKDMLYASEALEFEKAATLRDQIQAIKHTIERQSVVLPEGGDMDVIGIAVVNNGLALGFLFVREGKLLDGRTFFWPGLELDDGPELLGSFLSQFYSPISSIPPRIIVPWLPESTNNKDEISEDTFETLKYVLEDIRNSTVRIEVPKNIIESNLVDIAVTNAREAVQTKLGEPMSAKLAKVFHTDKPIFRIECVDVSHISGTNTRVGMVVFEDSQPLKNDYRIYSTTEDNSPFIKGDDYAALASWAKRRIQSGPPWADLVLIDGGKGQINAVQRVFNEHHLKDVFILAGIAKARNEEGRVDRRAGNIGDKIFVVGRMNPLTLKEGSPELLFLQYVRDTAHNFVLGKHRKARKNTALLGELLRIPGIGQATAKLLWSHFKTVEAMTCATIKDLEAIPGIGEAKARMLAERLQSLRNQ

SEQ ID NO: 114 - protein, 359 aa, Lawsonia intracellularis
MPIYRKVGARLTQMQELFSRNDNWLIIINADPDAIASAMALKRIMSRRTGKVFIARINEITRPDNLTMLRQLYIPLVPWSETLLPFFQKFALVDSQPHHSPIFQDIPFSIVIDHHPILPEFPSKATYSDIRPEYGATSTIFTEYLRSLHIRPGRRLATALQYGIRTDTGTFTRKFTDADIRAYQWLAKHASNTLLIRITRSEYLQDWLKYFTRAFTSLHDCGKGKFAFLGNIENPDILVVVGDFFTKVYGLKWTAICGVYKEQVVIVFRGDESIDLGKFASERFSSLGSAGGHRAMARAEFPLKLVEGKNLEVFIFRKLSERLHSKKKNSKKESENNEELSTKEEHKHPSEPLNTNQTS

SEQ ID NO: 115 - protein, 341 aa, Lawsonia intracellularis
MTVRLACGALEGVDAFRVDLEVDFLRQGLPSFVMVGLAEGAVREAKERVFAALRSCGFTLPPARITVNLAPANRRKGGSGYDLPLAIGLLVASNNLPVEVISGWFMGGELSLTGTLKPIPGILPLALLARKEKAKGIIVASENAAEASVVAELSTFGARTLSEVIDFLLGKISLPIVKPVEPDLPEVESILDFADVKGQEHAKRAIEIAAAGAHNLLFVGPPGSGKTMLAKRIPTILPKLDFEESLEVTKIYSVAGLLNQQGLIQKRPFRAPHHTISEIALIGGGVSPRPGEVSLAHRGVLFLDEFPEYAKSTLEVLRQPLEFLKLNGNVRYIESKRRLRN

SEQ ID NO: 116 - protein, 491 aa, Lawsonia intracellularis
MAFLSGSNFQICGPTGALVIIIFTIISRYGYDGLIITTIISGTILIFCGITRLGFLIKYIPYPVTIGFTLGIALLIFSSQVKDFFGLPMAETPPEFFDKWHLYLRNALSFSPSTLFTSFFTLLVIISVRFYIPRFPAPVMGVIFTTVIVWLFDLPVETIGSRFGTLPSDIPSFLVPLDFSIERLRILLPDAFTMALLIAIESLLSCVVADSMTGKRHNSNMELIAQGVGNIGSVLFNGMPATGSIGRTMTNIRSGAYSPISSIFHAIFLFGFILYLMPAIELIPLSAFAGVLVVVAYDMSDLMTVRRMFYGPTADWALMLLTFILTVVLDLTTAVYVGVILASLFFMGRMGEITQLQTVTKEYQSHEIVQDIPVEKDKLPKGVHIFSINGPLFFGVADRLQKLLEAMETTPKVFILYLHNMPTIDMTAIHTLESFIEKRRSGCKIFLADIHPATRSTLDRAGIIHAVGKENIFPTLQSAVEESTKFVEDTA

SEQ ID NO: 117 - protein, 303 aa, Lawsonia intracellularis
MNYRKVICIVGPTGVGKSEIAFHLAKRYDGIIINADSRQLYKGVPIITAQPTFEERSLIPHKLYACLDLHEKISAGRWATLAAEQLDSVCHTKIPLLVGGTGLYLRALFDGIVTIPPISTELSLTMEKQAEEKGISFLYNMLKVHDPLYANSIHPNDRQRVLRALTVFYETGKTFTWWHQQVTEAYPATVLRIGIKIPLIELAPLLEKRIDKMFVQGAIKEVITTYKRYFNKDVQNWSGIGYMELLGAIKGEYTFNEAKERWLKNTRSYAKRQLTWFNADKRIIWFCPDQLEDIQKCVENWLS

SEQ ID NO: 118 - protein, 706 aa, Lawsonia intracellularis
  misc_feature (361)..(361): Xaa can be any naturally occurring amino acid
MANKLYITATEKRSGKSAVTLGMMQLLMRHIRSVAFFRPIIANIDPNKKDHDINLILTTFNIAMPYEDTYACSFKEARTLIAEQKSPVLIEKIIQKYKHLEDNYDFILCEGTDYLSNDSAFEFELNIDIAANLNMPLAVIVNGKNKSIEDLISSTVTSSELIFDKGQDIACLFINKTTLAIPELENCKKAISTAIGSQVPIAMFPNNSVLSRPTVSDIKRWMKAEVIYGEECLNNSVEDYIITTMQPNNFLDQLQQGLLIITSADRSDIVLASLASRLSMTYPDIAGIILTGKFELSSHITRLINGWQSVPVPILTVSQNSYQAIMTLSELYGKINVSDTRKIHIALAIFEQHADSNAITXRVIERTSDKVSPKMFEFKLIEQARRHKMRIVLPEGTEDRILKAAEVLSQREVADITLLGDIPTIHKKISDLGLSLHNVQLIQPNQNHALFENYVQTYYELRKHKGITLDDARDWMNDTTYFGTMMVYKNDVDGMVSGATNTTAHTVRPAFEIIKTKPGASIVSSVFLMCMKDRILVFGDCAVNPNPTAEQLADIAISSAQTAHVFGIPVRVAMLSYSTGTSGKGIDVDIVSEATKIAHEKAPHLILDGPIQYDAAIDPDVAKTKAPTSVVAGKATVFIFPDLNTGNNTYKAVQRAAGAIAIGPILQGLKKPVNDLSRGCTVTDIINTVTITAIQAQAEQGLITID

SEQ ID NO: 119 - protein, 1187 aa, Lawsonia intracellularis
  misc_feature (616)..(616): Xaa can be any naturally occurring amino acid
  misc_feature (620)..(621): Xaa can be any naturally occurring amino acid
  misc_feature (623)..(624): Xaa can be any naturally occurring amino acid
  misc_feature (870)..(870): Xaa can be any naturally occurring amino acid
MAAKMKTMDGNAATTHIAYALSEVACVFPITPSSVMGETTDNWSAANKKNLMGQRVLVQELQSEAGAAGAVHGSLVAGALTCTFTSSQGLLLMIPNMYKIAGELLPAVFHVAARAIAAHALSIFGDQQDVMAVRQTGFSLLCSSSVQECMDLALVAHLSAIESRVPFCHFFDGFRTSHEVQKINVIEYEEIQKIVNWEKIHIFRKNAMNPEHPYQRGTAQNPDIYFQNRERSNPFYNAVPGIVIDSMQKVFSITGRQYQLFDYVGHPEADRIIIAMGSACEAITEVINTLNNQGQRLGLIKVRLYRPFSVEHLLRAIPPTVESITVLDRTKEPGALGDPLYLDVCTAFMETRDVKHPHIISGRYGLGSKDFTPAMIKAVYDNMLPNNRKNHFVVGIKDDVTHTSLDISDNFDTVPPGTIQCKFFGFGSDGTVGANKQAVKIIGDNTDKYVQAYFAYDSKKSGGFTASHLRFGDHPIRSTYLVTQADYIACHHPAYVIQYDVLEGIKEGGIFVLNSSWNTIEDLERELPPPMKRTIARKKLRFYNIDAVKIASEVGLGGRINMIMQTAFFKLANIIPFEKAIELLKQSIQETYKSKGEDVVKINYTAVDNTVSALNXIQVXXTXXDASTEFVIPRYKNVPEYIKTFVEPILTEKGDMLPVSSFTPDGIVPLGTAAYEKRAIAIDIPEWIADNCIQCFQCSYVCPHACIRPVLATEEELIGAPETFVTKDAIGKELKGLKMRIQVYPEDCVGCGSCADVCPSKPKSLIMMPLETQRQEQVINLDFAQKHISLKDNLMPRDTLKGSQLQQPLLEFSGACAGCGETPYVKLLTQMFGERMFIANATGCSTIWGGSAPTAPYCTNKDGHGPTWGXSLFEDGAEYGLGISLAIQQRRAKLAELIKEALTIEGISTELTNALNGWLEHQEDVDLSKKFGQDITTILSNTPTNPIFAQILEREDLFTKKSFWIIGGDGWAYDIGFGGLDHVIASGNDINILVLDTEVYSNTGGQSSKSTPLSAVAKFAASGKRTTKKDLGRMAMTYGYVYVASVSMGANKQQLLKAFKEAEAYKGPSIIIAYAPCIEQGIRKGMGKSMEESKLAVDCGYWPLYRFNPELAKQGKQPLILDSKAPDGNLRTFLAGENRYAQLEKNDPETANKLHEELNKEYNDRYRLLKQLSELTVTASEDPLLQR

SEQ ID NO: 120 - protein, 342 aa, Lawsonia intracellularis
MLETIWFVLWGLLWAVYFVLDGFDLGMGSLMPFLAKTDTEKRIIYNAAGPYWDGNEVWLITAGGATFAAFPKAYAVMFSALYAPLLIILFALIFRAVAFEFRNKIDTPFWRSLWDLFLFLGNFIPALLLGVAFANLFMGIPIDRYGVYYGNLLMLLNPYGILGGIFFVIMFCVHGALWLALKSEGLLHAKAVVTAKGLWFILAALTIAFLVMTYYYTNLYDNYEITPALLAFPVIAALSLIFIQLMLNKEKLLLAWICSALFILCVTFFGVLGMYPSLIISSINPTYSVTIMNGASSPLTLKIMLGVVIGCIPIVIAYQAWVYYTFAHKVTSESIHADDHAY

SEQ ID NO: 121 - protein, 433 aa, Lawsonia intracellularis
MDVVMLSRLQFAVAVFFHFIFVPLTLGLTVILALMETKYVKTGEEVYKKMAKFWGKLFLINFTLGVVTGITLEFQFGTNWSKYSEYVGDVFGSLLAIEATAAFFLESIFIAVWAFGWDKIGKKMHLTAIWLVAFASNMSALWIILANGWMQHPVGYVLRNGRAELDDFMAVFLNPYGWGQFFHTIFASWMLSGFFVLGISAWHLYRKNQMDFFKRSVNIAAPFTLIFAIIVALLGHQQGQSVAHHQPAKLAAMECHWETGSDVPMYLLVWPDVEEKRNIIQALPIPGLLSFLADNTTSAEVVGLNSFPDDDLPPILPTFLSFRFMVATGLLFILFAWLAWWYRDRLEYHPKLLKCLIYLIPLPYLSIMAGWAVAEIGRQPWIVYGLMRTKDAVSPIPESSVWISLISFIVVYSFLGILDIYLLAKYGRKGPQA

SEQ ID NO: 122 - protein, 402 aa, Lawsonia intracellularis
MKPVEITNDIYWIGAVDFNKRNFHGYSRSPQGTTYNSYLICDEKNVIFDTVDEEYSGVMFCRLAKRLPVDKVDYIVINHTEKDHAGALSELVTHCKPEKIFTSNIGKKFLDAQFDTREWPIEIVSTGDSISIGKRTIQFLDTRMLHWPDSMVSYIPEEKLLISNDIFGQNLATSERFADQCDPSSVKKRTKEYFYNIILPFSTQVRKTLDNFKEIQLDIQIIAPDHGVIYRTAEDCDRVLNLYREMAEQKLKQRAVIVFETMWGSTKKMAYAIGSGFDEENVPYSIIDIQKNHHSDVMTALADASGIIIGSATHNNSYLPGIADLLHYMQGLRPKNLIGGGFGSYGWSGEAAKDIQAILSSIGVETPSEPLRGTFIPKHQLLRDCFNFGKTIAQALKNKGQY

SEQ ID NO: 123 - protein, 422 aa, Lawsonia intracellularis
MKLFQFIKNKKNKPETVSGMLQTTTSDTAQSLLTLEQWGNISFGLTPGRLRSILQAADEGNITEQHQLFSDMEDRCEHLAAEISKRKRAILTLDWEIVPARKDNPTAIKIADAIREQFNSIYSIEDLLLDMADAIGHGFSAIEIEWEYDGHIHIPKAFHHRPQSWFQMLPQNKNVLRLRNKDPEGDPLWPLGWVIRTHRSRSGWLPRAGLFRVVAWAYLVRSYALEASINYVQIHGLPFRIGKYHIGSSSSDKRALLRALQTLGKDAAGIIPSGMEIIFQSPTNTSHDLPGQLVTRCELGMSKAILGGTLTTQADGQTSTNALGKVHNEVRRDLMVTDALQISSTISKQLIMPMAALNCKVEDTTLLPSFRFDTRAAVEVGIYADALPKLSPIMDISAQWAHDKLKIPKALSKDDILGSHIR

SEQ ID NO: 124 - protein, 352 aa, Lawsonia intracellularis
MIMEKYTMKKYVSLALILVISCCPLFANDKDTLNVFTWSEYIPSDVLADFTKETGIKVVVSTFESNEAMYAKLKLLGGKGYDIVMPSSYFIERLYKDNLLARLDKSKIIGLNNLAPESLGHSFDPHNDYSIPYMWGALGLLFNKKVVDPTVITSFNDLNRPEFKGRVLLSDDMRDTFGVALKVRGYSVNTTNPDEIKAGYEWLQQLKPEIRVFDITATKQAFIGEEVLAGISWNGDAFIAMKENPNLQFIFPKEGFILWIDNFSILNQSENKENAYAFINFLLRPEIAKRCVEEFFYTTPNIAGRKLLDPIYQENPIIFPNDGVMSKGELISNIGNAINIYTSYWEKLKMSH

SEQ ID NO: 125 - protein, 709 aa, Lawsonia intracellularis
MQKVIGTFVVQRSGAAFVIVDQQNTQKPYSDIFIRPELQNGAWDGDKVQVIVYPTKHGKNFEGQVVQILERPRKEVIVRVSQKHEKGGVVCYPVDSKLNVLFIVDTSKLPEKPIENELLVIIPTPNTNGELLMGIAQYSLGVEEDVRVQEKVVKLNYNIPCEFPLHVLKEENVAKDLFIKSKAVFYNVPYQKYDDISQCSTAIRQDLRVIDFVTIDGEDAKDFDDAICVYPTDIGWDLWVAIADVSHFVRAGSLLDSEALARGNSYYFPCSVESMLPEFLSNDFCSLKPKEERLVMATKISFDNDGKTKNVIFFPGVISSRARLTYEQVHLALEVKEISRLPGGIDTLSMLNNASELAKVLQANRIKRGSLEFDLPETRFLINKATRRVIGVIRQERFFSHQLIEELMLAVNEAVATFLHDKQIPFLYRIHPEPDIERLEKLFRILATTDLACQLSGSPDAKKLGGILEEAENTPQTFLISRMVLRSMMQAKYSPEPGEHFGLASPLYCHFTSPIRRYADLLVHRAVKFALGDTQKHIPFGQQLFSIAEQCNSHERVAQEAEREITKRLSCLVLQGDEGKIFEAIVTGITDFAFFVELISMPIEGMVRLASLKDDWFEYNQDRQELLGVRTGKRFYLGQRLTVKVSSVNILRLEIEFELHMMQPTSGENIKKGRTKARNYYRQKEKVRSSNSSFRKRKKKSSSLHQKGQ

SEQ ID NO: 126 - protein, 372 aa, Lawsonia intracellularis
MPGQKISDHYVVGGNNVYPLYNGEEVYPKMLEAISKATHRVYLSTFIFGNDFVGTLFIKTINEAAIRGCEVKILLDGIGSFFPIKSWREKLHPAIKLAYFLSPSLLPPKLSINLRNHRKILVCDSNIAFTGGMNISQHHLVTLKKSNRVQDIHFYCAGPIAKQLEIAFLLDWSFTTGETARIPFDPIKKQGSTLCRLIIDGPGSPHETIHDLFCAMSSSAQKNIRIMSPYFLPTPQLSEALASAVLRGVTVDIIIPLKNNHYLLQWAMAHQAPQLVDKNIHLFLQPPPFAHTKLLLIDNDYTLMGSANLDPRSLNLNFELVVENFSTTLTNNLIEFFDKKKSQSYQLTEHTKLPSLPIRLRNAASWLFSPYL

SEQ ID NO: 127 - protein, 475 aa, Lawsonia intracellularis
MMNNIYPIILCGGSGTRLWPLSREYYPKQFINFGSGTLFENTLSCIASLRNVQNPIVVCNEEHRFFVSKLLQQQNRVATIILEPEGKNTAPAIALGVSAVSELESDPLILVLPSDHLIGSNSIFHSAVMSGISVAIEGHFVTFGVNPTGPESGFGYLQYGQEVSDGIFKILNFTEKPSKARAKEFLALGNYAWNSGIFLFRASTYLNELELLAPQIFSACKQGWDERTQDPLGFFRPNSQKFLQSPSGSIDYVIMEKTEKLYMVKLETNWSDLGSWESFYNAEVHDSMGNVVSGDVIAQDTENCYLNSTQRLVCALGVKNIIVVETADAVLVVDRNQTQNVKNLLEQLRISGRTESETHMRVFRPWGSYETLFSSTGYKVKKITVSPGATLSLQLHQYRAEHWIVVYGIANVTINKAEHIVKVNQSIYIPVGVEHRLANYGEEPLEVIEVQSGSYVGEDDIIRLEDVYGRQSNNY

SEQ ID NO: 128 - protein, 347 aa, Lawsonia intracellularis
  misc_feature (72)..(72): Xaa can be any naturally occurring amino acid
MLFREGTRLINSRNWAKLVRPEAVINNMESNTTTYGRFEYEPLERGYGITIGNALRRVLLSSLQGAAFVSVXILGVQHEFTTIPGILEDVTDIILNLKQVRLAMDTDEPQHLSLFVSKKGIVTAADIQTNQHVEVLNPEQHIATLTEDIELRMEFEVRMGKGYVPAEMHEDLHEEIGLIKLDSSFSPIRNVTYVVEQARVGQMTNYDKLVLEVWTDGSVSPEDAIAYSAKIIKDQISVFINFDERISGSGGNEGSGSSDLNDNLFKGIDELELSVRATNCLRSANISTVGELVQKAEADMLKTKNFGKKSLDEIKALLTSMGLDFGMKIDGFEKKYQEWKRKQHHEA

SEQ ID NO: 129 - protein, 311 aa, Lawsonia intracellularis
MEQLLGDVIQAVAYEAPVRLSESDMINIRSLANKLDSSGQLGERVLSDFRQGRSVQAWDRLSKALSSYDPNVKLSISHKEIVSLGKALGANSATLDALSKSFKGSKELSLTPDQLRNLLVPLQQQMTNKIDAQSKLASQLEGALMPVIKEAKKRMDEEISAGTIESRRSEQSKILIQDTVTKNGIANIQQQDVASETLNKIQGAEQTQDTVTKNGIANTQQQDVASETLNKIQGARQNTDSANLPGNFNLKLVIKKIYFKVRIVVMDYLTKHNGQDSKGLLSDNKGKGVTTTSKHWMHHVELMGSLGVDYQ

SEQ ID NO: 130 - protein, 408 aa, Lawsonia intracellularis
MIPNLKLRNYRRVINLSHRDIAAQLTGVLTTEEKIGIFNQEDFLYIAGDWRLYRSSIVNNNRHNLFHWSDLEALGLIPEQSFKEVIWPPLRNIGSSGHIGLFVGASEAGKRPNAQFWGLLARYLIRHNLYPIFLGGPNDRSLAQECIDIAQLNSSNNFAGKFNLSELVLFSQKLDLFVTPDTGPMHLAAWTGTPVLNLSMGNVNPWETAPASPGHIVVRPAMSCVGCWNCEGRDFSCRSLFTPGKIGRLIVHLIENSSLEKSIFSGLHIYKTSRDERGLFTLVPLLPNIEHQRHLLGLFWKEWFIAMLGGMSDKLIPVSKLFFENAPHMCNPMQKTLLSLSKNVAKVLKKGSDIVPSKYWFSVMPALRPATGYIDLLLQNNKFSNKAWKKTGTLLSSLIETFSFASQC

SEQ ID NO: 131 - protein, 307 aa, Lawsonia intracellularis
MIYGNQPFQEVCHMSLVINNNMMAANAARNLNESYSRLSQSTRRLSSGLRVGTAADDSAGLAIRELMRADIKTFQQGARNANDAISLVQVADGALGVIDEKLIRMKELAEQAATGTYNSTQRLIIESEYQAMASEITRISVATEFNGIKLLDGSLSGPHKGTNLQQTGALRVHFGPGNSSAEDYYEISIHSATASALGLGNGTTGPGATISTQAAAQAALDAINDAIVSKDNIRASLGTLQNRLEATITNLNTQAENLQAAESRISDIDVSTEMTEFVRNQILTQSGVAMLSQANSLPKMASQLISG

SEQ ID NO: 132 - protein, 401 aa, Lawsonia intracellularis
MLVGLQGSGKTTSTGKLASLLQSQGLRPYLVPVDIYRPAAIEQLQTLATQLNIPCFASNAAMKPLDIINAALHEAKEKEYTVVLLDTAGRLHIDEPLMQELTDIKLVAHPQEILFVADAMTGQDVVTVAEEFNKKLSLTGAILTKMDGDARGGAALSICSSTGVPVKYVGTGEKLSDFEVFHPDRIAGRILGMGDMLTLIEKAQSTFEDDELKAITEKIQKATFNFEDFFSQIRRMKQLGSLSSLMKLIPGFGSAVSKFRVAIPEDEFSYTEAIINSMTIKERRNPDLLNTSRRQRIARGAGVTLNKVNQTIQKFDQMKQMMQRVVSDNSLMKNAESGEGGFGLGSFFGEGGIGFSALPGIPGLFGRPVLRSTSIGGVNGSGKSATKKKKEKKKHKNKKRK

SEQ ID NO: 133 - protein, 385 aa, Lawsonia intracellularis
MVLLGNLKHSDVKPTLIGQPARIKVNANIGTSPLESSFNKEMDKLKVAYEAGADTVMDLSTGGDLYKIREEMLAGTSLPLGTVPLYAVAQKYIKKHSDPAKMDPEELFEEIERQADQGVDFMTLHCGVTYKAAELGSQNNRVLGIVSRGGALLARWMFKNKKENPLYTEYDRLLKIASKYNVTISLGDGLRPGGGCDAGDSAQWEELMVLGELTRRGQQAGVQCMIEGPGHVRLHEVEAQVISIKKLTHGAPLYVLGPLVIDSSPGYDHISGAIGAAVSVRAGVDFLCYLTPAEHLSLPNKDDVYQGVMASRIAAQAGEVSLGRPLALEREACISESRKKLDWDGMRNAALDANAVDLRREPHKKEKVCSMCGDFCSMDMLNDKW

SEQ ID NO: 134 - protein, 924 aa, Lawsonia intracellularis
MRYFIKNFYPGKEPSMPQNSIYASNNKKKTQFMKKRLFFIFSIFLLGVFMATYMVQPLEATSSIIKTNDILPENLTKKHPIVTRLCNGLTVLVLEDNRFPLVSTRLYVHTGSAYEKPEQSGISHILEHMVFKGTESRPNATISQEVEAVGGYLNAATSYDYTVYKTDMPSSQWKLGMDVVRDMVFHPMLDPQDLESEKKVILAELARGEDNPHSFAFKKLLAKSLAGTPYSRPIIGYPETINAVTSQDLKDYIATHYQPQDMLLVVVGDVKANEVLQEANHLFSKYNNTQNIILPLPYYAEELPLKEGQGTVTIIPGTWNKIYLTAAVPVSNALNIESNTLDVLAQLLGGDKTSLFYRTYKHEKQLVEDIQVTNYSFERTGVFLITAEVEISKIRPFWDTLTKDLANLSAKKFSQQELDRAKLNLEDNLYRTKETLPGLASKLGYFEFFLNGEEGEKNTIEAIQSVDIDMLDEAISKWIRPERFAAVVLPPKDVPMPNLQATLEKNWPKKHEEATVVNQSNNKEEIVKLGKKTVVLIPDNTLPYCSVTLLFSGGDALVSDEQQGLPSLTATILTKGTSNKTVIEIQNFLADRAADLSASAGRKTFSVTFTGPSKFNNELFPLVLDIIKNPVFFQPEVSRGIQDQLAAIKSQEDQPLGLAFRKTPPFLFPHSVYGYMQLGNPEVIKKFTQQDIKKFWEKQIAQPWVLAIAGQFDREKVLQFVRDLPEPIEDKIVVPEPSWGKERELDINIPGRNQAHLLLIYKTVPDTNPETPIFNVMETILSGQGGLLFRDLRDEQALGYTVTAFNRQTTETGYLGLYIGTEPNKISVAEKGFKDTIQQSLIDKLLPETELNRAKNQIEGEYYRERQSLGSRASEAAMLTLENRPLNYAMEQVKKATHVTAQQIKELAQRYLLSEKPYIVKILP

SEQ ID NO: 135 - protein, 397 aa, Lawsonia intracellularis
  misc_feature (52)..(52): Xaa can be any naturally occurring amino acid
  misc_feature (70)..(71): Xaa can be any naturally occurring amino acid
MAKEKFTRNKPHVNVGTIGHIDHGKTTLTAAITKVASMKMGGKFVGYDEIDXAPEEKERGITIATAHVEXXTPKRHYAHVDCPGHADYIKNMITGAAQMDGAIIVVAATDGPMPQTREHILLARQVGVPYLVVFMNKCDMVDDPELLELVELEIRELLSTYGYPGDDVPVIRGSALKALNSDSADSDDAKPILELLDACDSYIPDPQRDIDKPFLMPIEDVFSISGRGTVVTGRVERGVIKVGEEIEIVGIKPTVKTTCTGVEMFRKLLDQGEAGDNIGVLLRSVKRDEVERGQVLSALKSITPHRKFKAEVYVLSKEEGGRHTPFFSGYRPQFYCRTTDVTGVITLNEGVEMVMPGDNATFNVELIYPIAMEQGLRFAIREGGRTVGAGVVTEIVE

SEQ ID NO: 136 - protein, 308 aa, Lawsonia intracellularis
MDVITLHQYGYTNAVGVLGTALTSEQVKRISGFTSNIEILFDGDAPGRKAALRACEMFLTKGLNCKVVLFPEGEDIDSVIKNYGKEFFEKLKNDASEGLQFCIQSLKTRAPRDVIDWVKNFLKQVELPEIVSRFTSILSTGLGLAESELREYVADIKHSIKKKVTQSAAISHSLVQTTPRDKQILMFLVRYPHMLDKLKEQGAHLVLNTTWAKELWGKVEEYSEDNIMQYLNSQEKTFWVQCRTGDVPPLDNEEGEFEAIQTMLEALHMTVQSASVSAALKLGKTSSFEADLKYLRALQETLERTHGE

SEQ ID NO: 137 - protein, 430 aa, Lawsonia intracellularis
MGNNVKEIQQIRTLIAKGKAAGFVTFEEVNKAVPIDMNTPEQFEEIIGIFDQLEIVIVDSEKEGKKITVTSPETDGDTSENCFDLVDTEDVADFSSRSTDPVRMYLREMGAVPLLDRDGEVVIAKKVETGEQDVLYALVEVPVAVEELISVGEDLKLNRIKLKDVVKTIEEDDPSEDEMSQRNRVILLLEEIRQIFKKKRKVYLKLDECCTLERRVAGIQKEILQFKEEIVTRLRDIKLEKTLIDRIIETVEDYVRQMHNCQRELSAYLLSTGKTQDEIKDLFTKLDARELSPRDAALLLNMGVDELFSYKEMILGKIEILQRLQEKCCHNVVDLEEVLWRIKRGNNAAMRAKQELIRSNLRLVVSIAKKYTNRGLQFLDLIQEGNIGLMKAVDKFEYQRGYKFSTYATWWIRQAITRAIADQSDEYVHE

SEQ ID NO: 138 - protein, 316 aa, Lawsonia intracellularis
MHNCQRELSAYLLSTGKTQDEIKDLFTKLDARELSPRDAALLLNMGVDELFSYKEMILGKIEILQRLQEKCCHNVVDLEEVLWRIKRGNNAAMRAKQELIRSNLRLVVSIAKKYTNRGLQFLDLIQEGNIGLMKAVDKFEYQRGYKFSTYATWWIRQAITRAIADQARTIRIPVHMIETINKLIRTSRYLVQEFGRDPTPEEIAERMDYPLDKVKKVLKIAKEPISLETPIGDEEDSSLGDFIEDKKAVAPSEEVVNTKLSEQIASVLADLTPREEQVLRKRFGIGEKSDHTLEEVGKLFNVTRERIRQIDQLLLE

SEQ ID NO: 139 - protein, 309 aa, Lawsonia intracellularis
MNALQISQGKKKEKKKHLKHTPKNPSSSIPTCCEEEKTSTSNEDSTIPYPTLNRPEFEELKIPDTPKKKPKKKKKPGLGTLVGDSLLSEGRTTSTSDTTPIQPPSGFINQDHKDKKEALKNCPLSPPDEFSDDDNTKEDSGPMYIPGVFCGNNLDLESPRPKKPHTYLPNIIGDVTSITTETLETLDIYNSPLGEGEEDNEDPQKNVGENEEIQVAVRESEQSQAQQQQQPQCTNNTGTSPLGQNTPQHPIVAQTPAQPTPLPGNGRRARRQQTRQTQLLTKKHPSTNSLIAELLPEGQFYRSCSNVLT

SEQ ID NO: 140 - protein, 711 aa, Lawsonia intracellularis
MNNTCVLSLINYIKLLYIIKFLNRYRLVKYINNINNNSKYLTKINIKSIPCILILLFSIVCIKVTITFAMDKNSDMNDKEASTPNISNFLKGLVPKKLHCYLDDEQTELDINVTAIKESQKTKNPSQKSIIINCTIIHPQLREPLIFGSYTQVNQSELELLKTLVQQPITIRQLAQLGLSGAESSNKLQTAAQLTSPLGSKRKYAPVSSTETLTTRTSSSIETSSIPQSTQSASSSIITTSNLEEPVVRPKIPSTKQGKNKAPLDKPQTLVTASKRSVFSLNLQLLENLGLQKIKAIYEEGQSTLHILLQTIKDLHREGQADKELTEKYRSMLEQQVELAKFIKEKEEEEEEQQQIKQVMKRHENVQDLLEMLKKNISCSTSTPEQINFDLLSLPVDQLSQLDLTTLKNIFEPVESKRRTLEDQIRQQIKEGKQVDPTLQQKYQYLVTLQTDVLMATKNFSEEKLSQLPPTSGLAYRLQEVKAITQLLKEKIPPSPKSEDGNNIQFIILEKKDDRRSETSKTTVRINQQGIQTTNTKEKTKKKNLIATLDKSSSLLETDIEPPHSSEQQSSSSSNSTKKKKKEKKTSPVKTHTFSANIPSEEVITTTSISSEQTTVQMPLEAKTLVATGDKQQPSSSSHHKQKKKQTQTSTLSSNQSLLSIHANSPSPSIESTSQQSNAMPLKTKEAIENECTPDIPREKKRKEKASETYT

SEQ ID NO: 141 - protein, 364 aa, Lawsonia intracellularis
MAASIDDQPVLLHVLTKKGKGYEPAEKNPASYHGLGAFDIQTGIPKSNSQNSPPTYTEVFGKTLCELAEKDKRIVTITAAMASGTGTSLFKAKFPTHFTDVGICEQHAVTFAAGLASQGYKPFVAIYSTFAQRAYDQIIHDVCIQKLPVTFCLDRAGIVGEDGATHHGAFDISFLRCIPNISILAPRDEAELQSAIYTALSFNSPLAIRYPKGNGVGVTLPNESTPLPFEGELLKEGHDAIIIAIGSMVMPAYSAAQQLQEEKNLSIAVFDSRWISPLPQHQLIELANTFNNILLIEENALAGGFSSAVVELFADNQCLHGQRIQRIGIPNYFIDHGSQKELKQCLLLTVDGIKKMLLQMLQPE

SEQ ID NO: 142 - protein, 341 aa, Lawsonia intracellularis
MIHRKLPTSLQDLPSEHARLCLSIKRFLEENLSQNIQGTVIVGCSGGVDSMALALILHCLGIDVVFAHMDHQLRAESKDDANHVKSFAAALDRRCIISRVDISGLAIKYKKGIEETARQERYCFLEQVRKEYGAQWIATGHHLNDLSEDILLRLLRGTGWPGLAGMKAVDKKRYLLRPLLTTRRTLLVSFLSSQNISWVEDNSNKDITFKRNRIRHTILPLFEEENPKFSNVAHMLWSLAKEDEEFWDKMITDVFSKIEGSPEYFWIPRSELITLPKSLRLRVYIEAIRRLNIGQGRASTLFLLDNTLMKGERKKFFQFPGNVLVKLEQDKVIFTATIKNT

SEQ ID NO: 143 - protein, 314 aa, Lawsonia intracellularis
MRTTFDCIVVGGGHAGCEASMALARLGQKVLLITGNVDRIGHLSCNPAVGGIAKGHIVREIDALGGMMGLWADKAGIQFRTLNRSKGPAVRATRAQVDRDLYMQAVKQDIFSQPNLSVWQDTVEAIIVKDGHTGGVKTALGQLFNSQYVILTTGTFLSGLMHIGQKNFSGGRLGDVGTSKLSSSLHSIGLHLGRLKTGTTPRLLKTSIDFTSMEMQLGDTPIPSFSFHGPKPSQPQVPCYITWTNEYTHDVIRSGMDRSPMFTGVITGTGARYCPSIEDKVARFADRDRHQIFVEPEGLTSQECYINGISTSFW

SEQ ID NO: 144 - protein, 364 aa, Lawsonia intracellularis
MYKKFFNIYLNIITTHHLHFFLYFFLLTLLECITYTTSHAASIEPGIRLESLCIENNQTKLDLAIWYPTLQKPIQINYGDWNIIASHGAKPYPGKYPAIILSHDSAGSRFSLHELATTLTQKGYIVVSVTHQGDNADDMSLMFTIKQITGRVHQLNIIIDFLMNDQELFDILDTQKIGIIGIGTGGTAALLLGGAKLDPSAWWDYCNNIILPSSSIIVNDAYCSSWVKPKMNILAQQIDPQETYNNPRITAIVVVAPGFGMFFSKESLASLSRPILLVEATKDYINPPKYHSQYIEKQLSTYYEMIVLSEASTATLISPCSESLEQVLPEMCSKELDVTKQLIQKEIANTSAAFFTRCFSLFKK

SEQ ID NO: 145 - protein, 448 aa, Lawsonia intracellularis
MCRYDSRTFKSKPVCLQLPIGAEDNFEGIIDLIHGVSLKFDKETKGLEVERGPIPPELMELYQEKRLEMMEAAAEEDEVLLAKYLEGTELTAEEIIACIRKATIEQRLVPVLCGSAFRNIGVQPLLDAVVQYLPSPLDIPQMVGHNPNSPEEEIVCHCSDKEPLAGLVFKLASDPFIGHLSFFRIYSGFVESGMTVLNTTTEKRERIGRLLKMHANKREDIKWAGAGDIVALVGLKQASTGDTLCDEKRPVILESLDIPEPVIEVAIEPKTKTDRDALSTGLNKLAKEDPSFRVKGNEETGQTLIAGMGELHLEIIVDRLLREFNVNANVGKPQVAYRETITKPGKSDTKYAKQSGGRGQYGHCVIEIEPNPGNGYTFINSISGGVIPKEYIPAIDKGIQDALKSGILAGFPVVDIKVNLVFGSYHEVDSSEQAFYVAGSMAIKRCYA

SEQ ID NO: 146 - protein, 369 aa, Lawsonia intracellularis
MQDAGEVKQFNPENYGILPKQSKRMDRFVQFAVASASELIKDSGLQITEANAYQVGIILGVGLGGLKTIEVFHEKLQEVGPNRISPFMIPMLISNMAPGQVAIFTGAKGSNFVVTSACASGTHAIGLAYSEIQLGRCIACITGGVESTITKLCISGFSALKALSTKYNDMPTQASRPFDKNRDGFVAGEGTGYLMLEELEHAKARGAKIYAEVIGFGTSDDASHMTAPGEDAEGMSFAMKQALKNAQIAPEKITHINAHGTSTFLNDMYETVAIKKTFGNHAYNIAICSNKSQIGHLLGAAGGIEAVFSVMSLYTGIVPGTINYTTPDPNCDLNYMPNGPQELNPQYVLSNSFGFGGTNASLILKKFEC

SEQ ID NO: 147 - protein, 334 aa, Lawsonia intracellularis
MNIPFTTNSLYIEGIGSYTPSTILTNEDLCQLVDTTNDWIVTRTGIKSRYILNDYENTSDAGYIAAKLALENAKITTDSISHLIVATCTPDFLCPNTACVISKKLGIVGPMAFDINAACSGFIYGLNIVQHIANDPTACILLIGSDALSKRVNWKDRSTCILFGDGAGALVLKGKKTLSTIAEVQDTVCYANGSYTSLLTVGGGTSKKYNLGDTIDDTFFIKMEGQEVFKHAVRNLTEVCTTILQKHDLSFKDIDLFIPHQANQRIIEAAASRLSIPHEKTFITLDKYGNTSAASIPLAIADAIKQQRIQSGMRVLLATFGGGFTWGAAILNFY

SEQ ID NO: 148 - protein, 363 aa, Lawsonia intracellularis
VKEIQQALLNWFYKNKRALPWRETYLPYHVWIAEVMMQQTQMDRGVEYFLRWIKQFPDIASVAYAPEEKLLSAWEGLGYYRRVRHLQSAAQVIMHKYNGTFPERYEDILELPGIGPYTAGAIASTAFNQDFPCIDGNVERVLSRIFDINTHIKKEPTKSKLYDLVKQLMPKKNARDFNQSVMELGALVCKKKPMCLICPVYSMCNSRINGTQLSRPVLAKKTPTTRLKMVTGILQCNQKIFIQQRLDNNIWGRLWEFPNGCIETGETPESAIIRNWNEQLGFSIQIENIITTIIHNYTHYHITLYCFDICFSQNITNTLSVVLPNPTRLSASSYRWVSQKELQTIPLPSPHRKLATLFFNTKK

SEQ ID NO: 149 - protein, 353 aa, Lawsonia intracellularis
  misc_feature (113)..(113): Xaa can be any naturally occurring amino acid
MEQKRILIKGNEAVAYAAVAAGCQCYFGYPITPQSEIPEMLSHLLPESGGDFVQAESEIAAVNMLLGAGACGVRAMTSSSSPGISLMQECISYMVGSEIPGVIINMTRGGPGXGSIDASQADYFQSTKGGAHGGARTFVLAPSTCQECYDMTIKAFSLAFIYRNPVLILGDAMVAQVKEPVVCWKPEKKLEDNADSWRLNGNKGRSSRLLRSLNLKEGGLAEHNNNLLRKYLSMQQDIEAEEYFIEDAKLVVVAFGSIGRIVRSAINTLREQGYKVGLFRPLTLFPYPSSMLESLAKQGKNFFVIEQNGGQMVEDVRLAIRHYTDANVHLVPVGVSIGAEDLLQPISEFFRRI

SEQ ID NO: 150 - protein, 380 aa, Lawsonia intracellularis
MEFVLESISPTKKKLTISLTPDEVNTALDSVIAQYKKDLSLPGFRKGKVPNSVVFKKFSEEITNKATEETLKIYIKEIFQKEHIKPLCNLLTEDTDFIRNESFSSTLTFEVLPEITFPNYEGLEVHQDVVKVTDEEVAELLKNIQLAMAELVDVKEDRSPQNGDVVDVDYKGFENGSPVTDVSGEHFVLTLGQRQALEDFEQLVKTAKVGEEKVGIVNFPRDYAHKGLAGKSIDFHIKLNSIKTSILPELDADFAKKAGYEDIDKLREAAKVQLEIKKKQNAKSNAMKKLINGLLEQVTFDVPETMLETRIERILGDHNIRSQQTVQVQTGEERSESEEELYNNAKVEALAVLRPQIFLMALAEKEKLVVMEQRGRKSFV

SEQ ID NO: 151 - protein, 381 aa, Lawsonia intracellularis
VNHPYDYAMKYAISIAEKGRWDTAPNPVVGSVLIQNGKIVAEGFHSLYGGPHAEVLCINDAKNKHINLSDCTLITTLEPCNHYGKTPPCTKAIIDNNIKHVIIGTKDPTTLASGGVHTLTSAGITVEVGILEKECQALIADFITWQNTSRPYILLKLATTLDGKIATSTGHSKWISSEVSRQKVHKLRENVGKVGGAILIGGNTLKLDNPQLTCRNNNNNNNNNKIQQPLAIIITSTLPEQQDIYLFNSRPTETIIYTTPQSGSTQQATTLRKKGVKIVTLKNWSPDLSAILTDITEHIRSTQGCLYMLCEGGGKLGSSLLKANLVDELHIYLSPKILGDNNALPIVNGRNPLTIHDAISLKIHTMELSGSDIHLTFRPEM

SEQ ID NO: 152 - protein, 412 aa, Lawsonia intracellularis
MDQIILQDPELAQAIILESGRQIDKLELIASENIASTAVREAQSTILTNKYAEGYPGKRYYGGCEYVDIAENLAIERAKALFHSEYANVQPHSGSQANMGAYFALIKPRDTILGMNLSHGGHLTHGSPVNFSGRLFNIVSYGVNKETGLIDYEEVAKLAEKHKPQLIVAGASAYPRIIDFSKFRSIADTIGAKLLVDMAHIAGLVATNLHPSPIPYAHITTTTTHKTLRGPRGGMILSTEDMGKVINSQIFPGIQGGPLMHVIAAKAVALGEASKASFVTYQKQVILNAKTLAKQLLDAGFNLVSGGTDNHLLLIDLTNKKITGKDAEKALDQAGITVNKNTVPFETLSPFVTSGIRIGTPALTTRGLCEQDMIKVANWIVTALNNINNETQLKEINKEVTYFARQFPLFSW

SEQ ID NO: 153 - protein, 471 aa, Lawsonia intracellularis
MAPGQVAIFTGAKGSNFVVTSACASGTHAIGLAYSEIQLGRCIACITGGVESTITKLCISGFSALKALSTKYNDMPTQASRPFDKNRDGFVAGEGTGYLMLEELEHAKARGAKIYAEVIGFGTSDDASHMTAPGEDAEGMSFAMKQALKNAQIAPEKITHINAHGTSTFLNDMYETVAIKKTFGNHAYNIAICSILIADTLGRVSEQAFAIPTDHLSPLAAWAGIICYTLQIYYDFSGYSDMAIGLGHIFGFTFPENFNYPYISKSIKEFWRRWHITLSTWFRDYLYIPLGGNRHGLGRTVINLLIVFTLCGLWHGSNWVFIVWGLYHGCFLVFERFFPKFPSIFPTFLQHVYAVLVVTLGWIFFKATSLTHAKEYFYALISGNPPGIQANHVWLQLFSTDVYLALIIGILGSIPIFPFLKNKWEHLLIKQKTSIAISLEGLRFFMLFLLFFLCIMPLFGSTYNPFIYFRF

SEQ ID NO: 154 - protein, 353 aa, Lawsonia intracellularis
MEHIDLIFILDDLENDEQVRKPEQRDKLQAWLQKTVLNLGSADDSMDVLYIGTILHYDSVLARTLTKSLWQKKVFKAILQWPDRMDLWDQWEVILSEQGEKEAWRFWEVHQEEMLQGSKVSWPSMRPLYLLMKRRAEDHAAFDSEYQNDPLCGDDAPFAQCIYYWSTPSDSWTFFGVCDPSLGKHGAGRDPSALLVGGFCQKSMTLHVIEASIRKRHPDRIIEDIIALHRQYKPVLWGVEAVQFQEFFAHVLVQRAEKSGLALPVKAITHNSDKLLRIESLQPHMVQKHILLHPSQQELIHQLRHFPKADHDDGPDALEMLWEIACSSVSIKDGFIPVSSSSYSEQTMYDSWR

SEQ ID NO: 155 - protein, 340 aa, Lawsonia intracellularis
  misc_feature (107)..(107): Xaa can be any naturally occurring amino acid
MKIIHSAIFAVTLLTAWSTVCFAAEVTASCTKRVESYNYLVDYSGSMMMKHVAVREPKIELAKEAILKINAAMPKMSYQGGLYTFAPYSVIIPQGSWNSCVAECAVXTIKSDLEIFGRLTPMGDGIKMHETVINQMPPQAAVILLTDGHNNLGMNPVEEVKSIYQTNPNVCFHVVSFADDAEGKAIIDQIVALNSGSVLVDGLQLLQNPAVCQEFVNSVFCQEQILVTEEVVVLRGVNFAFDSFALDDTAKAILEETVRLIRANPDFNVRLLGWTDSTGPDAYNLRLSQERADAVKNFLVKMGIPSNRLFAKGMGKSYQYNNATKEGRYMNRRTELVFFD

SEQ ID NO: 156 - protein, 307 aa, Lawsonia intracellularis
MLGNLIASIAFNYETMMLARFISGLPHGSYFGVGSIIAEKLSDKGKSTEAISIMISGMTVANLFGVPLGTFLGVTLSWRIGFLIVVGWGLVTFFYVWRWVPQIENVPDTGLKGQFYFLKRLAPWLLIIATILGNGAVFCWYSYIIPLLTNVSGFSPHSATLLIVFAGVGMVIGNFFGGVLSDRLMPIRIAIFIQGLLSIVLICIFFFSYIPWVSILLMILGTACLFALSSPQQLLLIKFSKGGELLGTSSAQMAFNLGNAIGAYCGGLPIQMGLGYQYSALVGVPFSVIGCFILYFFYQKFGMIKVN

SEQ ID NO: 157 - protein, 318 aa, Lawsonia intracellularis
  misc_feature (35)..(35): Xaa can be any naturally occurring amino acid
  misc_feature (91)..(91): Xaa can be any naturally occurring amino acid
MNLYIYIYIRKEKIFLQKNATFSHKSGVYIFPFTXKNNFLNPSEQHNIFLLCYLLKESIYDELIIDSKIYTEHIEIALFLIECCNLYNKKXRIVDKELPNIVSDTNDTKQVQKMLMLPSEIAILPLTGTCNVKCRFCEQAYTKIPYRKMDFDIFCQTINAIPDKMFIKVGLTPFQEPLSTKVFNRYLEYALKIRPEANISFNTNGTFLTKEVSQWLVDIGLKTIVISLNMPDPVSYQNFIGKNLFNKVVSNIETLCCIKKQQNSRYPKVIVQYLKLPPVLGQESVLQQRWGNIADTVWFRNVAAPTSDPQKLAAFNKN

SEQ ID NO: 158 - protein, 394 aa, Lawsonia intracellularis
VCYNPFPSSNIIIAYFLCHGKRIVCNVFKNFAALKLYFIWLCTLKKDTMTQLEETIPVMAEHSNQKTASPTTHNHSIINEIETQDTQQTLESQPIVTHSLTLQQTSQATPEHSEQTSTNSWSENNISKKIPHNVYQASTKKLKTRSRSKNKNRTTKNSTLPVPTTNHLPALISKNSGLEQNSPEINKKMLISVIPGEQVEVAISSDGQLFEYFIEMNHHAKIRGNIYKGVINNIDANLQAAFINYGNTKNGFLQIDEVHPEYYLQPHEPTKLKKYPPIQKVLKAGQEILVQVVKEPTGNKGAFLTTWLSLAGRFLVLTPGQEQIGISRKVEDEEERTRLRELIKGLDPGSGLGAIVRTVSIGTSKTTLSKKTLVFLSVFGEKFVKKLQQKNPHV

SEQ ID NO: 159 - protein, 705 aa, Lawsonia intracellularis
  misc_feature (45)..(45): Xaa can be any naturally occurring amino acid
MEKLNKTQVQKLEPLKSYSLLWNISLKQSLPLWIKCVLFVILNEXCLHDILENVYDNFTEIAGQQEHSIDPSMLIARATITRRRGKKTYNQFIMVIGQEKGHGEEFRNGGSVKPWGNSKALHYMKVAETEGIPIHTYVFTPGSYPIEDTPGAAQQIAKNLYEMADLSVPIISIISEGGSGGAEAIALADKRLMLSHGYYSVISPEGAAAIEGKLKPGERATPELIEFCANQLHMTAKDNLSFGFIDGVIQEPDLGARPHHYDFFRKLRQEVIRATDEVVLGVRGLGLFRRIALNRLGKEDINIDEMYVGWNLNLKSCARLVSKRQKKFITLSKNSCLDQRPFFNKFHNLLNDSIGTLVSKTRYFFYTKCQRKIRFVFDEITSELHLVKSRLTAPLCRIRPPKRQIEEAVVHQLTTLSDWDDTESRKGRWSYISPRATEDRSISCPNAATHGCFDLWAPDLFGEFAGVCTSCGHHFPMEYQWVAKNIFDENSIREFNTEIEAINPLKFTKFDEKLIEARKKTKLKSGCITFEATIHGIKTIVAIFVGSFRGGSVGAAEGTKFVKAINRATKKRYPFLAYVHGTAGIRIQEGTHGLAQMPRCTVAVRRYINAGGLYIVLYDTNSYAGPVASFLGCSPYQYAIRSSNIGFAGRGVIKETTGMDIPPDYHNAYKALARGHIQGVWDRREAQANLKQLLLTVGGRNLYYR

SEQ ID NO: 160 - protein, 330 aa, Lawsonia intracellularis
MLYNQPLPFSPETPWLAPIAGWSDLPFRLLCREHGAAVCYTEMISAKGLIYNNPGTESLLKTIPEDNPLIVQLCGSEASCMKDALTILLEKGYKWFDCNMGCSVPKITRTGSGASMMKNIDNSIKIAEAMIHTVNKKSIGFKLRLGWDEKHETWPILAKLLEEAGAGWITLHPRTAQQGFTGTANWEKLLELKQQVKIPVIASGDLLTASHGVDCIKKTHVDTVMYARGALKDPNIFTKHNQILKGKQITTTNSNSLFSMIMRHSYLACKYSSYDTALLKMRTIVPRYIRHLKGAKQLRLNIISCRTWSSFEDILQQFLKKEQVASCNEN

SEQ ID NO: 161 - protein, 338 aa, Lawsonia intracellularis
MPVGTVGSVKAIAPDDLEAISAEIILGNTYHLYLRPGDELIARRGGLHVFNAWEKPILTDSGGFQIFSLSSLRKLHKDGVIFRSHIDGSKHVFTPERVITIQRNLNSDIMMVLDECVAANADYTYTAQSLDLTIHWAKRSRDVYPKGEGDNLLFGIVQGGMFKSLRHSSVSQLIDLDFDGYAIGGLSVGEPKEIMMELLYDTAPLLPKTKPRYLMGVGTPLDILKGIEAGVDMFDCVLPTRNARNGTLYTSQGKLNIKRKEYAEDDLPLDENCSCYTCQTFSRAYLRHLFHSQELLAFRLNSIHNLTYFLNIIFGARKAIHGGYFFNYKQQVEQLYCN

SEQ ID NO: 162 - protein, 633 aa, Lawsonia intracellularis
MGKIIGIDLGTTNSCVYVMEGKEPKCITNPNGGRTTPSVVAFTDKDRLVGDAAKRQAITNSARTIFAVKRLMGRRADSPEVVHWKEHAPYKIVAASNGDAAVEIDGREYSPQEISAIILSKLKADAEAYLGESVSEAVITVPAYFNDAQRQATKDAGRIAGLDVKRIINEPTAASLAYGFDKKANEKIAVFDLGGGTFDVSILEVGDSVVEVLATNGDTFLGGEDFDQRIINYLVEEFKKEQGIDLSKDNMALQRLKDSAENAKKELSTAMETEINLPFITADQSGPKHLLIKLTRAKLEQLVMDLVGRTIEPCSKALEDAGLQTSNIDEVILVGGMTRMPLVQKKVAEFFGKEPNRSVNPDEVVAMGAAIQGGILAGDVKDVLLLDVTPLSLGIETMGGVFTKLIDRNTTIPTRKSQTFTTAADNQPSVSIHVLQGERPMASDNMTLARFDLTGIPPAPRGVPQIEVAFNIDANGIVNVSAKDLGTGKEQSIQITASSGLSEADIEKLIREAESHASEDKKKQEIIEVRNHADGLIYSTEKSIKDLEGKIDAELQADITSKIEALKKVMEGEDSAAIKKATDELASASHKLAEQLYKQTQETSGASGDPTDTSASSSKSGDDVVDADFTEVK

SEQ ID NO: 163 - protein, 307 aa, Lawsonia intracellularis
MVQKTEYIWFDGEFIPWDQAKIHVLSHALHYGTGAFEGIRAYRCIDGTSAIFRLSDHVKRLFHSIKILGLRIPHLEEDISSAIIDTLKINKLTEGYIRPLSFVGEGIMGVHPGDNPIKTIIAVWPWGAYLGEEGLKNGINVKTSSFVRHHVNAMMTKAKLSGNYVNSVLAKMEAKSSGYDEALMLDSAGFVSEASGENIFIIRDGVIKTTPLTSILGGITRNSVISIASDLGYTVIEQQFTRDELYISDEAFFTGTAAEVTPIQSVDNRIIGEGKIGSITHAIQKKYFSIVKGEDPFYKNWLTFFTI

SEQ ID NO: 164 - protein, 574 aa, Lawsonia intracellularis
MKQVSLAIRYRPQSFKEVVGQEIVKKILSRAAAESKVVPAYLLSGTRGVGKTTIARIFAKALNCQQAPTAEPCNTCEQCKRITKGIHVDVVEIDGASNRGVDDARRLRESIAYAPMEGRYKVFIIDEAHMLTRESFNALLKTLEEPPPFSTFVFATTEPHKFPVTIISRCQHFVLKPLTKEELIYNLIHVLKQENICYEDNAIQLIARRASGSIRDSMSLLGQTLMFSNGILTENVVRNVLGLAEQEFYEKLLRAFKDQNYEEVVKLNQILLEKGVDLGFFLREFATLWRNLFLLRKVSKLDANMLGMLPDEIPRLTSLANLFEPIYLHAAWQMVLENQRQILMSLEPPVALELLFLNLTLLPHLVSLEQISNGLAALSSTSLETEISNKLRDNSMKKDVISASTESESISNTKFQNEYQEVVEGDLQFISVKDVKSKRDTISSSMNEGEIIEEPTWEGFLQYCSKNGSTINTYFLNKLTGIFQQNTLVITVDSQFLYEKLISDKLEKLYELVHNYAGEKYTVQLIEPKNTFKLETEIKKDIVSHPVIQILQQTFDAELLRCTPTTNLHIKPNK

SEQ ID NO: 165 - protein, 676 aa, Lawsonia intracellularis
MSNLLFTIKTQYKPQGDQPEAIKQIVSNIQSGVKDQVLLGVTGSGKTFTMANVIAQCNRPALILAPNKTLAAQLYNEFKELFPYNAVEYFVSYYDYYQPEAYVPSSDVYIEKDSSINDDIDKLRHAATHALLTRRDVIIIASVSCIYGLGSPEYYARLIIPVEKGQQINMDEIITRLVDIQYQRNDMDFHRATFRVRGDVLEIIPAYEHERALRLEFFGNEIEEIREIDPLTGEVLGNVGKTVIYPASHYVSDRDNLIRAMTDIQKELCERLYDFQATNKLVEAQRLEQKTQLDLEMIQEFGYCNGIENYSRHLDGRKPGDPPSTLLDYFPKDFLFFIDESHIAIPQVGGMFKGDRSRKQTLVDFGFRLPSALDNRPLEFHEFLTRLNQVIYVSATPGPWELDRSQGIITEQIIRPTGLLDPEIEVRPIKGQIESLLEECYQRVNSHERVLITTLTKRMAEDLTDYLNNMSINTRYLHSDIDTLERMAIIKSLRTGEFDVLVGINLLREGLDIPEVSLVAILDADKEGFLRSTGSLIQTFGRAARNVSGKVILFADTMTKSMKAAIDETRRRRALQQEWNTKHNITPKTIQKSVVTPFDMISANTSSKKGCRKNKHSMDTKELFVITDKTSPEDITKYIKQLEYEMKEAAKELEFEKAAVLRDRIKVTREQFLLMS

SEQ ID NO: 166 - protein, 450 aa, Lawsonia intracellularis
MVALCFTITAVITVVISGSWFDIDPAGMAGIYAGAMVSSPALAGILDSVSPYQSVIITTAYSLLYPVGILASILYTQWIIAFDKSDTRKAEEELHQKSLFENPPIHIGCFEVYPRSVSSVREIHNLFNVRITHIIPAGRKVVAPASALLKICPGDKIRLLGSENALKRVETFLHAKIANDTDFKEHIHHYQLVVTKKEACGSRIMHLAAKCHMDTLMFEHVHRNEIDIPLTPRTRLYMGDILHLSGDPRQIETLRRLLGDDPRQLQIADVMPVMLVISLGWLLGNIPIPLYEGKTFMVSSSAGVLLTAIFLSNIKKLGSIDFYLPSSSLLLLRETGLALFFAATGVHTGASLNMGIILQSGNILLCGLITTILPMIVTWYFIKFVLHMNYLYAIGSFAGARATASSFAIATAITKTPYVAAVYSIVFPVVTLLQIMSSKVVYTLGSLYLF

SEQ ID NO: 167 - protein, 618 aa, Lawsonia intracellularis
  misc_feature (603)..(607): Xaa can be any naturally occurring amino acid
  misc_feature (613)..(614): Xaa can be any naturally occurring amino acid
  misc_feature (617)..(618): Xaa can be any naturally occurring amino acid
MGMADIAESLWRCFLKHNPSNPQWINRDRFILSNGHASMLLYGVLHLSGYDLSIDDIQNFRQLHSKTPGHPEYKCTPGVEVTTGPLGQGLAVAVGMAMAERLLATTFNREHFPIIDHYTYVFVGDGCLMEGISQEACSFAGTHHLGKLIVFYDNNGISIDGKVNKWFTDDTPARFNACGWHVIPNIDGHNAEAIDSAIILAKSITDKPTLICCNTIIGYGSPNKSNSQSSHGAPLGKSECDAVRTELHWKSEPFQIPEQIYKAWDCRKKGTMLENEWNELYSKYCSTYPELSSELERRIQHILPECWNSLTTSYLQEIEQNKIAIATRVASKNTLDIIAPCLPELIGGSADLSGSVGTIHSHTKYICNLSYDGNYLSYGVREFLMGSIMNGIALHGGFIPYGGTFLVFSDYAKAAIRLSAMMNQHVIWLLSHDSIGVGEDGPTHQPIEHISSLRLIPNLNVWRPCDAVETTIAWEKSIESQKTSCITLSRQPLTYQSRTKEQISNIQYGGYILYEPTKSPELILIATGSEVELAITSAIQLEKEGYAIRVVSMPCTSIFDSQPKEYKELVLPSTIRKRIAIEAAITDYWWKYVGFDGDVVGPXXXXXIESWLXXQIXX

SEQ ID NO: 168 - protein, 803 aa, Lawsonia intracellularis
MLLSLNWLREFVPYEGTAQELGNRLTMLGFELEDIITPYNNIQSIIVGKVVHCEKHPEADKLSICTIDIGQETLLHVLCGAPNVATGQKVPVATIGTTMPDGTIIKKIKLRGIESFGMICSEKELEFTDDHSGILVLPEELTVGTSLVNALNLDTEILKISITPNRGDCLSILGLAREISTAFGLPLFPQQPIHFLEVEPDFSKNWSVHVSSKKVCSSYLLRLVENISVQKSPLHIRHRLHSMGIRPISNVVDITNYILLELGQPLHAFDKDLIEGNTTYISLAKEEEILCTLDGKNHTLTPSDLIIYDDTKPIALAGIMGCQNSKVTEATKNILIESAVFNPSIIRKTARRLGISTESSYRFERGVDSSGAMYALNKAIKMIIDTSGGEVKIGNAHYEPTPYKQPIIQLDTSNIQKVTGTSIPSNFCINTLTQLGFEIDTSNCNIWDITIPSWRKDIQHSVDLIEELLRFYGLNTIPEELPCIYKSLNDIGLPESQYQFITKVKHWACGIGLNETENYSFIGNNELDLLKFSNNTRLIIYNPLTEEQNVLRTSLIPSLLNNVKYNVAHGNTGLRLFEVANTYTFEAISETTAKEVLKLGIVMHGDLFDTGWPQPSTSASYLDLLGIVEHFITFLHLPPLTTSQTDTYAFLNPGVDLFIHGKKIGYIGCISQHIAKNCHTHKEIWITELDLETLAHLYKNIKITFKPLPIYPSSYRDMTLIITSNTSISNIKSYMDLIDIPILENIFLLDIFRPNNIEQHCTFRFVFRSAKKTLKDSEIDLAYKKITEILSNQCNIRFNVLLE

SEQ ID NO: 169 - protein, 345 aa, Lawsonia intracellularis
MDLIKEFERLIPEIKKNLEQASSLEHIEQIRVAFLGRKGQLAALMSKIPSVDTSLRPVVGETANSVKNQLTQLIHEYKTQLDFLTTTNRIQNFDAGLPGKRPWYGTLHPITIVLEEICSVFTSLGYTIATGPEVETEYHNFEALGIPSEHPARDMQDTFYISDSILLRTHTSSIQIRTMLKKQPPIAIIAPGRVYRRDSDVTHTPMFHQIEGLVVDKNISMSHLRGTLTAFLKTIFGAEIKIRFRPSFFPFTEPSAEMDISCHPCNNTGYVKNEICRICKGSGWIEILGCGMVHPKVFESVGYDHNIYSGFAFGLGVERIAMLKYHIEDLRIFFENDLRFLRQFM

SEQ ID NO: 170 - protein, 382 aa, Lawsonia intracellularis
MINHNVEQITQEILTRLESDKSDEIRSAAFEAAELKASDSIPLLIKHLQSPNFGVQEAAEYAIRKIGGVETVQTLNTTITHLHSYRELPQRYFELGVVHRHEKSGVLHGLLRVRQFTQDDAHIICMPEQLEEEIIQVITFVRDLMSLFDFNYHIVISTRPEKSIGSDYAWELATSALIQAVEKINLPYSINHGDGAFYGPKIDIKVTDAIGREWQLSTIQCDFTLPERFELEYVGQDGKRHQPVMIHRAIFGSIERFIGILTEHYAGAFPTWLTPIQVKILTVTDAQTPFAKHVYSQLQDVGIRVGLDIRNEKLGFKIREAQLAKIPYILVIGQKELELESVNVRLRTGENIGMQSVTEFIKLVENDCIQPFKRGGMNYRFS

SEQ ID NO: 171 - protein, 338 aa, Lawsonia intracellularis
MLTQDSEIEVIGVAKDGIEGLEKIKNLKPDVVTMDIEMPKLDGISTLKIIMDEMPLPVIMVSSLTKEGAEATLKALEFGAVDFIPKYPGNSLASMDLAALSSDLCTKVKAVAARAKRFPLKRIRKDKVPIISPVKKDFFTSPNHSERSRRDIIAIGVSTGGPPAVQKVLSELPETFPACILIAQHMPAAFTKPFAERLNSMCKISVKEAEHGNPIKNGIAYVCPGGRHLRLDLKGALPQISVVSEPSTALYKPSANVLMESVGKSMGGRSVGVIMTGMGSDGVEGMRVLKSKGGFVIAQSEASCVVYGMPKAIVDGGLADEVVDLDNIAERVASALYK

SEQ ID NO: 172 - protein, 344 aa, Lawsonia intracellularis
MTDNHNGDNILDLIRSVFQVHNVALFLPTEDGNFTLVSASTECEPYTEEFIIPPGKGLVGWVLRHQQPLILNNFDQRQGYLGYYSNNDEKLITSFMGCHLPGGGALCIDSITNHVFTEVDQQLLHRFAKLVVRQINTMGNANNNQRLRRYYDGLEQLFKLHEQTNWKEFLSLFLAIVTETTDSDYSVFVSSVEGSSTYFVEGESSPLVLPHKKPLPEFSLVNGGLLGWVFRNEVPIYAEGTDGSSTPLFGKVSYIPEFQSIICLPVSINKITCGVLCLASCTARPLPQDMRIFTTMATISLAQYLNIVALKYRLNRLLPDATIHRSGAIFYDPDTAPITHIKEE

SEQ ID NO: 173 - protein, 333 aa, Lawsonia intracellularis
MKRKYIAMDLGTANTLVFIQSQGIVLNEPSTVAIDTLSGKVLAVGKEAHAYIGKVPHNIEVIRPLKDGCIADFDMAQTLIANLLQKIIGKWLVRKPHMIICVPINITGVERRAVIDTAKRAGAHEVRLIEEPIAAAIGASLPVLEPIGSMIVDIGGGTTDIAVISMGEKACAQSVRVAGDALNKAVQRYLQEHMQIFVGEIMAEKIKMTLGSLETPPEPLTMEISGKHITNSGPTNLKLDHTHVQKAITPVIDIILKSILDVLEQTPPELSADIMQQGILLTGGGSLIQGLNTCITNLTGLPVNVDRTPLTTVINGAGATLDDIARYKQLLLE

SEQ ID NO: 174 - protein, 482 aa, Lawsonia intracellularis
  misc_feature (464)..(469): Xaa can be any naturally occurring amino acid
  misc_feature (471)..(476): Xaa can be any naturally occurring amino acid
  misc_feature (479)..(482): Xaa can be any naturally occurring amino acid
MKTKFIFITGGVLSSLGKGLSAASIGALLTSRGMTVTIQKLDPYINIDPGTMNPYQHGEVYVTDDGAEADLDLGHYERFLGTSLSQKNNSTSGAIYYKVISKERRGDYLGATVQVIPHITDEIKSTILSLAKSSIDNNTPDIAIIEIGGTIGDIEGLPFLEAIRQLQTDLGRQNCLYIHLTLVPYLGTAGEHKTKPTQHSVKELRSIGIQPNIILCRCEKPIPDDIKAKISLFCDVEKDAVFSAADINNIYELPLKFYTEGLDQKITSFLNLPTKQANLKPWEQLVNTINNPKGKVTITIVGKYVGLTEAYKSLHEALCHGGIANEITVDLQYVNSEIITEDNVNEIFKGVDGILVPGGFGSRGIEGKIESIRYARQKNIPFFGICLGMQCAVIEFARNVAGIEKANSEEFNPVAADKVIYLMKEWYDFRNNAIEYRDSLCDKGGTMRLGSYPCTLIKNTKAFXXXXXXSXXXXXXHRXXXX

SEQ ID NO: 175 - protein, 310 aa, Lawsonia intracellularis
MWFVEDFRLFTYWRNFAPYYDFFFVIQKEPFLEELASVGVANSCYLPMAALPTFHHPMDLSPMDQKKYGSDISFLGAGYPNRRVAFRQLTQFQFKIWGNDWDNDCFLRPNVQCDGKRISPEDAVKIYNGTKININLHSYIKHKPFVSNGDFVNPRTFEIASCEAFQLVDQRQLLSELFSENEIATFTTIEELKEKIQYFLARPEERFVIAERGRRRVLTEHTYQQRMRDLLSYISEHAVDWPKERAIMSLPDAVSTEYKEELKELFNKLKITTDSNFDDIIFAIRQESGVLSPIETSLLFLDEWRKLYKK

SEQ ID NO: 176 - protein, 406 aa, Lawsonia intracellularis
MKRYLVIQLARFGDIIQTARLIASLLREGEVHLCVDKTLVELAEAIYPKCIVHGIIAHYSGVQQVIRDNYRVFNELHFLEFTEIYNLNYSGVNMAFATLFPSEKVRGYIVKDGQPVTEKWIKMGFRWTAQRKVSPLNLVDFWGMLAPNPVIPQDVNPVAKSGGKGLGIVLAGRQARRSLPPEILAPLVRIFFEHTSGKKIYLLGSKTERSIGRTLMSYLPSKLIEKTENLAGKTNWNELVEAVSDLDLVVTPDTGIMHLAARLGVPVCGMFLSSAWAWETGPYGEGHKVWQAVIDCAPCIESKPCNLNVKCLKAYSSPEFHKSIVGIKEQLSTTMACLESSFDELGLIWKNDRENTYVKSVRMAQRALLMEYQGITIASSKEFPEIADGRLAMNLYSEADWMLPDR

SEQ ID NO: 177 - protein, 495 aa, Lawsonia intracellularis
MQVANWLMEKNIPVVTENSFLLIEHPIILQFIAILEFLDSPQNDLAFWRIINGGNLVQPLLNIPQQKLDEWICIRNRSQPLYLAFKADFPDAWEHWILPFYDDSGLLSAYDAIQESIDRLKIKKRFPKEMSFIRRFLEIIYIASTKGYDSISNFLEYWKQHGHKEKTPMPENIAAVRIMTIHKSKGLQFPIVIIPWHDFPLKPNDSLIQTCVDGFNIIVKQSPAMPKEYYSSLLKNVCESLNLLYVAWTRAEEELYALITSTKSKKISFAEAINPILDYLSWDNNIYQLGEKTYTSNHTAMLSSNKNSTEIPYIYLETKDESTSSWRPMHWLPQLRIFRNPVNELGITSKRRGTFIHHCLQYLCISKNPNIDISLAIDYAIKRFPLPLPSSQYNIIVKDVLSILQWYTSLPKTRYWIQFGLAEQTLLDKNNNIYRVDLLVNNGKEYSVIEYKTGETSLQHIQQLQKYLDIIKETTSLPVKGYIIYLDLKRIHTIE

SEQ ID NO: 178 - protein, 441 aa, Lawsonia intracellularis
  misc_feature (18)..(18): Xaa can be any naturally occurring amino acid
MELSIIFYPQRLHYPLPXEQFNLNTLLPELKGKKSSQLSYPKETFLTILSNLHNNNNNNNIKKTINYDITIQADHVTCWKFDGYQFICNIQPKPQGTQIHTNCKNFYDGSLSSSLLLSNRHTIQLAIENIQLSDITNIITKEYELKGKASGTSRVNGHGDTLASFLSSLKGTIDLYVTDGLVKKTASEAIPFSMLHLTCDSIGQPSKGNKSSTIPYKGKWSAEISSARWNGSITMDGLIQFSTTDWLSIKAENIPSKVVCSVSGVQAVAYGGISFDIDNSFLSFSNFQGEIHPKTALSGTIKTSSSTSNTRQWEGSLTVMTQNLRNLLSKLGYEPKNISPTMLQYCKLQGDIFISPATIRLTNIQGILDNTLIKFSLNGLQTNPPSWTGDIQLSSLNLDKYLLSINQNKLKKSQELWPIELLNKVNIQSTLTLHGMYLLWP

SEQ ID NO: 179 - protein, 352 aa, Lawsonia intracellularis
  misc_feature (28)..(28): Xaa can be any naturally occurring amino acid
MQQSILLFLGHLILVHGLRGKLYHQFIXCIQQTSNINQQSITTQKSTTLHIPPEKSFIPALLFGDRFFLSHTLNAVTCYTGLAHSLALSGQHLAVISIASITIIIILIKILPCFFLSLPRYKAIPLFSLPFALLYLWIGGAPPSLLRATIMLFIWSIYLIQNKPICFLDIAIIALICLILFDPQGIYHIGIQLSFLAVLSISFFNPLLQKCWKAIHKRISTTITSEILYSTITTSIKIIIFTIGTTLIVQICTLPLCLYVFGYIPIWFPLNIIWLPILGIFVLPLAFVSLLFCSLQCTSIGILCINLAQIPCEILIRLLLSLKNTEIISPIWLPRPSWTMLLGCYLILLSMG

SEQ ID NO: 180 - protein, 520 aa, Lawsonia intracellularis
MWLTTSYKMGMAALIMAGSVILSRVMGLIRDKVISWEFGATSEADIYFAAFVIPDFINYLLAGGYISITLIPLLSKSFQEDEQNGWKFFSTVFYWATIAISVTTFIAWFFAYDLAKITAPGFTASNQERLGFFLRIILPGQIFFISGACISALLYIRKQFLVPALMPIIYNSCIILGGLISSSNGMEGFCWGVLIGAALGAFLLPFGVGLINGIHFYFSLRHPLMKHFLWLALPLMLGQSIIILDEQLIRIFGSLAGEGAVSLLNYARRIMLVPVGVVAQSISVASFPFLATLAAKNNNTKFNETLNKALKGSLIIALPITGWMIGIALPTLGIIFEGGRFSHIQTVLTAPLLQIMLFSVPFWVVQQVIGRAFYARQNTLTPALIGTFSTVIFIPFFSIAVKSWGSIGIASLTAISIITYTFLISYKWYKTFGITAFTGLKTILMRSCFIVIPSGLSAWIITTLTSSFLTSFSPFILYLLTIAINTITFSIFYFILAFYFFPPISNIIQNYFKKLVTQLT

SEQ ID NO: 181 - protein, 505 aa, Lawsonia intracellularis
MEVRFQIGVSSWSTDAIIIPFFEDEIFKEAYAELLNVLPWLEVAPALEDVKGKKGEVVVVYGPLSTTIPRVVIVGLGKRKKITPIKLLENLRNTIGKASSYCRELGLKNFSILVRSFERFDYNLERIIEEVICAIGLALYRFVDCKSQEDLKELPEDPQWIGVLFRDTVADETICNAARRGEVHATAVNLARTLDNTPANIMTPIQMSKKSIEIAKKYNMKCEVMDRASIISAGMGAFASVAEGSSQEPQFIILEYAPLGHENDDPLVFVGKGITFDTGGISIKPSAKMEEMKCDMSGAGAILGLFEALGQLKPQVKVIGLLACAENMPDGKATRPGDVVVTLSHKTVEIVNTDAEGRLVLCDAMTYAQKHWTPAVLIDIATLTGACVVALGDDIAGVFCDEIELVNKIRNIGELVGESYWSLPLDDRFFESLKSDFADFKNVGGREGGASTAAVFLKQFVKEDTKWAHLDIAGPSFTSKKKDLCPTGGTGFSVRTLIEFVMDYS

SEQ ID NO: 182 - protein, 465 aa, Lawsonia intracellularis
MSARILIIDDEDSIRFSLKGIFEDEGHEVLERASAEEGLKCVDVESPDLVFLDIWLPGMDGLMALDHIQALHQELPVIMISGHATIETAVTAIRQGAYDFIEKPLSLEKVLITANRAIETVRLRRENKLLRTVLPEESEFIGQSPVILKFKSLLSQVAPTDAWVLLTGENGTGKELAAQALHKGSSRYQKPFIAVNCAAIPEELIESELFGHEKGAFTGADASRAGRFELAHKGTLFLDEIGDMSLKTQAKILRILQEQCFEKIGSVRTIKVDVRVIAATNKNLEDAISDGTFRQDLYYRLRVVPLHLPPLRERDSDIELLLNRFVIQLSKRYRREPPIFLDEVFPVLKQYCWPGNVRELLNFVERMVILYSGKKVCLTDLPQEMHTKRSIDPSKKQFNISQEISSIITSSDIDFKQAKIAFETKFLTEKLHAYQGNITRLAEAIGLERSYLYRKLKSYGIYLSE

SEQ ID NO: 183 - protein, 355 aa, Lawsonia intracellularis
MQKVCYFFLITFFYFFITENYLFATSITTSTINQQHIAYTVTFTSPENPNLATEMETHSELVKLANQSLDSKIGLNLRVKEDISTAQKILDSNGYYSGSVEGKIDWQTNPISIQIQFKPNVQYKINTIHIQYLDSELAYLPLSLEEFNLSKGNPALAVNILSSVSSLMQYIHNNGYPLAKIKKTQYIINRMDYTFDIDLVIRQGPLLHMGKVQPQHNLNISTIFLNKIATWKEGRVWNNALLDSYRTRLQQTGLFSSITLNPRNQKEQNGNTSIELVATEAPPRTISGGLQYSSDQGIGARGTWEHRNVFGNGELFRITAPISRDDQKIMANFQKPAFGRPNQSLISEAQLKKKL

SEQ ID NO: 184 - protein, 379 aa, Lawsonia intracellularis
  misc_feature (372)..(372): Xaa can be any naturally occurring amino acid
  misc_feature (374)..(374): Xaa can be any naturally occurring amino acid
  misc_feature (376)..(378): Xaa can be any naturally occurring amino acid
MQSSITPWTIVEREGKRIGIIGLITEATATGSRACSQAIFTNAEQALRNAIQEIKKQNVFTIIVLSHLGINVDMELASKVDDVSVFVGGHTHTLLSNTYPNAYGPYPIVKHSPSGHPVLIVTAKEKLEYLGRINITFDEQGIPQKWNGDVIRLDKPISNDPAIVSIAELLDSYGIPIKEKLEVKVGEIAHPRNPNFDTSQPSNEQLDEKPFFYCRKQEGLTANIILDAILEAGRSNGAQIAIVTTGLIRGNLPIGLVQKLDVVTAIPIEDKLYVGDVTGKIIQEAIENGVSKVHCFAFAGTFLQVAGLRFTLNAEKPVGERIQSIEYLNNGKYEPLDPNKTYRVIINGYPTEGHDGFIMLKDIKWTDIQKSXVXAXXXY

SEQ ID NO: 185 - protein, 368 aa, Lawsonia intracellularis
MVQTTQKLFEPANLLPLSAQVYNTASMCIRPWQFMLQDQLCTLDLLFLHDPFSSVYTIVIHCGEGRWVIEFGKVPPLSLYPSFKDKPEVLCVPEEVKLAVFELLISPFLHQFENMMGTPVELVSSTLSPPSRDNFSVACSIPLVLHVEGNENEIPFLVKIEKENDAILLLSQLQEFPLAYSDVGPLSISVGIEVGYTQLSTQQLQQIEKDDILIPDQFFIQEKKIQLRFSRFLANCTIQGGMATIMDVNDVGYPEDQGNGGEQFVENHTEAPNSHGQQRTARANSGRQSGQQSSGIDVSGLDLPVVFELERQFMTVQNIGLLAPGYTFALSVDVQAPVTLRVNGKAIGVGRLVDLNGSLGVQVVQVML

SEQ ID NO: 186 - protein, 302 aa, Lawsonia intracellularis
VAVEYKDYYKVLGVERNATKDMISKAYKKLAKKYHPDLNPGNTEAEEKFKNITEAYEVLKDDEKRKMYDQLGSNWKDGQYFQNESGFDNFSFNFGGDAFGGSGFSDFFESLFGGGQRGRSSGFSGFSSRQHRGRDIEAEISISLEDALHGGERSFTLQTPDGPKTLKVNIPAGVREGAKLRLAGQGYSGSGGGATGDLYLHIRFLPHSQFHVENNNITYNVQIMPWEAVLGTKIRVPTLEGNVELSVPAGTSSGRKMRLRGKGLGSSNSRGALFVIIGIKTPTNLTDKQRKLWEELAANAEK

SEQ ID NO: 187 - protein, 342 aa, Lawsonia intracellularis
MYIIIGYFIVIASIIGGYLMAKGNLALLFQPAELVIIIGAALGAFFASQTKYSFTLVIKNLSHIFGDPNSTKIKYLETLALLYGLFLKMNREGVISIESDIEKPESSPIFSKYPTIVKDTKVVAFIADTLRVYLTTGAPEDIDNLMESDMKITHEEELLPAHSISHMAESLPGMGIVAAVLGVVITMGKINEPPEVLGHYIGAALVGTFIGILFCYGFFGPMGSKLETSAEEAQEVFLSCNKSIYEPPYLHFSALAASSSHNLRCLSVRLVGVLIPIITKRAPREFEEPNPFPRSRILRPLLVPAGTESSTFPSRVGTLIFVPNTASQGIICTLYVILLFST

SEQ ID NO: 188 - protein, 361 aa, Lawsonia intracellularis
MGKVPYATRIQYVSECQKKACDETVNTQFIDTQSVLATPQGKYTTYTQESNKHIRLRAKDKIHVTEAGGRLLMNHLMPYIKQSLETITVNNTKDNKQDLYTSNAENDIVIYIPSSIQQASIPCSVFIPQNKSQEKYPVLLLLHGVGCTNEIWKQMTGDLLQQLATFHSIVIIAPDGGKNSWYVDSPLIQTSQIESFIINELKPTMLEQLPIIDKWSIAGISMGGHGAITLGLRHPMLYTSMSAINGVLNLMVHPHEWGIKNVLGELSDSQQLWESYSAYHLIDNISKEDVPPMLISINLTDPALDENRCFFHKATKLNLPIQYSETSSDQYWDYCLYQLPIHIGFHAKKLHHHNELSQNND

SEQ ID NO: 189 - protein, 344 aa, Lawsonia intracellularis
MQDLLPLDTLELEVGYGLIPLVDEEQNGNLLSRIRSIRRQFALDMGVIIPSLHLRDNLQLKPGQYVLLIKGNQVATAEILIDHYLAMDPGNALHQIEGIETREPAFNLPAIWISEMQREETMLAGYTVVDPSTVIATHLTEVLKRHLADFLGRQEVQGLLDTLAKHSPKAVEELVPGILPLGSVQKVLQNLVRENVSIRDMLTIVEALGDYGGSVKNPDTLTEYVRERLGRSITKAYLDSDGVLPVITLGSKTEQTLQEAIRQVEGGSYLALNPSIAQQLIHNINMAIEGAVGTDGQPVLLATPIVRPHLAQLITRFLPNVPVISQGEIPPDTRLQAVGNVEID

SEQ ID NO: 190 - protein, 353 aa, Lawsonia intracellularis
  misc_feature (229)..(229): Xaa can be any naturally occurring amino acid
MQVKTFIGPSTQSVLAQVKAELGPSAIILSSRDFQKDGQRQYEVTAGIDRPITSGGNNSNNLNGESPPQGWDEWFRDWTKVKEHLYALMQPSIQWERLSSRQRTALEYLQREEVDDAVIMELYHRLSSVPGSSPFEALSEIVPIRPWSAESWPERIQGITGPFGAGKTTSALRMALLLRKTDPSIRIGFINADCERANSRLVLKHWAELSEFGYFEASDPESMEKVIEXNEDKDYLFIDFPGISNPKETLTMQLSALGLSSMEFVVHLALPPHYATLQNQAFLSKYQSQHLSSIVWTKLDEAATYGSIVNVAMATGLPISALSYGIGLSDTLSSAYESVLWKLVFKHQLPGQV

SEQ ID NO: 191 - protein, 386 aa, Lawsonia intracellularis
MHVIFINYGGYLGCSGVHIHFLAQTLTQQGIRCTVYLPVTIKSKNYFGQADYPIFTHNDLVAHSHTGYFKDSIIHAWTPREVSRKLTIYVVAQTHVPYFVHLEDNEITIMEQMFNKPFIQLQQEALEKPALFKDVQYCHPLYFQQFLNNATGVTCIINKLEEHVPSHVPRMTFWPACEETFFRLPEKIPESVYKELGFPLNTIFVVYPGNIHEYNKKHVSNLITAIDYVNKKGHSIKILRCGETAIPMEQLAPPHALAHIIDLGTPEAHKLHNYISLAHILVQPGCPGDFDDYRFPSKIPLFLASGRPVILPNTNIGLNMTHGKNCLLLKTGSAEEITKYLCLLIENPKIATSIGKQGKQFAYSTFSWEKSAKKLIQFYKKCLPNL

SEQ ID NO: 192 - protein, 488 aa, Lawsonia intracellularis
MRVGSRPDPNVPTNVEQNSDIDSDDNTSSSTTCCVSTHSVNEGAQQHSDSTPLTDRASQGRKWDPSIDFNRLGAQLITSVQSFFTIIRDRVSSFITNMKDSGPWARSRGSYDFHRDDDTISTTSSDSYTTVSDINSSEDTASLNSFHSVSSHSSSEKTFPVYTQEQLQQFAQEGVTNLVHSRPYVSNGPSIKFPDQLGGHGDVGFLQGTNIVFKQNLTAQEAKTYKLLNDLKNWLQDPQPSSINIPESLKGISRSEMKQLLDNKDLLLSSLPFPLAMAEGEGSAAVAIKNVNMYQSEEGSFNKVSSKGVIDVKLGCKTMSLAELKAHYPNKTKGISLFRKIVTNGVLPMLRGTTSRGYEVIPQAKGMKRLFMAKQASDNLMQNLSARLTAQQAVNLAKQVTDLTRAMRILPITFVGSSMLIALPDASSTNSMPQVGLVDFGHPVFSTEVTVEGPITEQVYGELKDNYMEAIGKLQSQIEEISYQASRH

SEQ ID NO: 193 - protein, 642 aa, Lawsonia intracellularis
MESNMKVGPSDPGINRVQIEEQPSTESISSSSSGSSSGIRTREQSSNLDQRRMTSSNLRMSLRLNPVVSDKVLKFFGLRSASGSYSPSTSSSSSSSSATRSSRYSSTDSLSSRSTIGSNITFSESDESYYSTIEEDSESIYESVSSSSSSDIYTYDSNSNSSSVSNSTQSQAPELPPRPNVLQSEAPEPPLRPTSTSSQHSIQSQDSVGSDDVFWSESEPESLYADKEQVGEGAYGPIRSSLEEPIVLESNYISFGSDGVVYSDFAPMPQVTSKSSQSDSVSTPPPVSPREQVAGSLGVGSRSKLSSTNNVASSLFDPNMQRIARQAIDKTIHGNFGSPNGPKVDFPYQVGGYSKTGYIAGTDLIIQQHVNPTEQEVYTFMSQVGEWLKDPQGGPENAPEVLSGLTYPQLSVIHSYRDRLLGSLPIPVAMGGTSDNSAVVLLNPNKQPDGSGGVMNLSGFESTDVKVGPILVSKSELSAHYSKQAGGLGWARKVVTGRIGPGMRGATIRGYDMKLGKNERGFSRLQTAVGNSDDAFPKRLGGLTSNQLKNLEKTMEGLQQAAHFLPVTFVGSTLQFVLPNPGDTTTMPRVMLGDIGHPIFKDEATGDGPISPRIYDKYKSNFTSGMDSIKETISNIVKSKIE

SEQ ID NO: 194 - protein, 900 aa, Lawsonia intracellularis
  misc_feature (92)..(92): Xaa can be any naturally occurring amino acid
  misc_feature (408)..(408): Xaa can be any naturally occurring amino acid
MTKVGGSNPFSTLASMVGFSKSSSSSSSSKVAELKSKFEALGTLTKASPRPANGTQDTNRLSDRLFRGHYTVPANTASRVGGHLQRVDDNKXSSSAANVAKRAAAHSSFASSNPGLQGASGSSSGGTGGSITDQVKSRGITARNFSDSNNNSIGSGSSSGSILDQVRSQGITARGSSISSGNASGTSNVNDGTSSRDYGANVRNTRERFEAGPGGAQGESPGVKDAKEATKGVSVSNLRGIFEGRGGADNNQVGRSSGGVSGASGSGGAQGTGGTSGLGGAQGTLGSGGLDGGGVSGAAGGTSGASGAGGARGTADGITSPGAREAQETIKNAGVSVRDLAGRFSGAQGTSGASGAAGASGASGAGGAAGAAGGGGLDRGGVSGSAGGTSGTSGAGGARGTADGITSXGAREAQETIKNAGVSVRDLAGRFSGAQGTSGASGASGAAGVAGMPAGSGDVVDGLRRGGEDTVDGFGRNQGSGPIPSSADFVDGPIGGIQGAGGASGAAGAAGASGAAGASGAAEPLPTNGTDQQIAEVVVRNAENGHFDGIDFSTQPGGVESNTGSIPGTDLIVQRDITPGEQGVYNNLSEMGSWMDSPNASPTNAPESLTDDHSVLTTLLNNKEGLQDTVPFPLAVGEGTVVTKTLDPDIDTSKIKIPLEIVFGSGSMYGSGIGGGSSTISSSMSDDGSSSIGSTTRKNRAGEIISRIAMNQSPGAGSGGQTVVGGLGSGSSNINISGGRGGIVYGPMPNVNVVAGDGLNRLQLGSGINPLALLQERMVNFSAAQLEHLHGQLTGMMAMMEAMPGVAFEGASVQMTLPEPGDTQTMPSIRLSGFGEPRLRENIGQPGQPPTQEAFDALRNGPLNGVSELMSQVQEMITVRSEGSISLSRSSSLSDLSSEI

SEQ ID NO: 195 - protein, 636 aa, Lawsonia intracellularis
MKYIRCIYLGLLFFIYESINQIVRVVLLIHVGTSAIDSFYSIPLILSVGFINDVFPFILITLPLAICVLLTGSRVVGKITQQILFFVFSLYTAVFLFTGAAEYLFWDELHCRFNFIAIDYLIYTTEVVKNIIESYPIIPILIGILLCSLGVSWILLRPIAKKINNIPVPSVRWFFSVWIILASITTIYSPPTFSNNALSQELSKNGIWSLFSAFRNNQLDYRQFYPVIDKKLAFELLHHELIEPNSVFFNDNSMEWRRYIHSNSPEKHLNVITIVVESLGSVSLGDRTPHLNDLSKKCLYFTNMKATGTRTVRGLEAIILSLPPTPGASIVRRPNNHNLFNTGTLFRQRGYDTVFIYGGYGYFDNMNEFFSGNGFRIIDRSTIPDEYKTFTNAWGICDEDLFDAVIREADIAYTSNKPFYHVALTTSNHRPFTYPDGRVDVPSGTSRTGAIKYTDYAIHRFLKEAKKKPWFSDTIFIIVADHTAGSAGKTVLPPDNYDIPCFIYSPAHIKSQKIDTLCCQLDIAPTLFSLLNWNYSSSFFGKNILTLSKNDGRAWIGTYQLLGYLTEKELVILEPLKNPIIESFLSSYTTATNKSNSILIQQAIAVYQTAQELFTQGKLKENMLSTPDEIILSTSQ

SEQ ID NO: 196 - protein, 426 aa, Lawsonia intracellularis
MKNLLNQLEDNIHVFLLARNEDVAVVDRRSLRSINVKSIQFMELGIKAASTLVSNYLNQLSMPDLILCHEQLKDITGKEFVELLQLHPVLKKIPLIMTITNISQEHAENMYYSILKRPYSSSDLLKSIQLAKEKTQSIQHTVTSNTIAFETALEYFIKTHQSTKELSSENSYTAGIKAIREKNWDEAITQLNYIVKHQPEHANALLALATAWKGKGSKRKYRDILDELLHIYVKNHQWEHAKTINQRLVQVNEGTSNPLYSEACEFLSKKNISDAAQALIAGRTPFQNELLYEQVARGCIANPNPQEIATTLQEYLKSIGEAPLAELLGKHLFQPVKKRILSLEHSAKKIISSSKNEEQFSFFLDSANTQDKKQHKTNTQQTKNINEPENLKDRFKAPSFLKSMPKLQDAISILKFTYHMFRDSKK

SEQ ID NO: 197 - protein, 405 aa, Lawsonia intracellularis
MGNCTSKLYVIMVGLPARGKSTLAKRICSGLEQQGIQTAIFNNGELRRTLFGGESACPEFFNPQNKRTKRFRDQILYQSMAGARGWLEQGGDVAIIDATNGTFVQRMNIMMTLQDRPLLFVECVNEDPLLLSASIQRKTKLPEFTELSEDEALESFKKRLAYYESEYTPLSNEPCWMRVDAVDNRILAESPCNDLPYYAAIRDIVVSRWVHDLFLVRHGETEYNLEGRIGGDPPLTEKGQEQAKQLADHFMSIDIPYIFTSTKIRSIQTAELLLASHNKTVCMELTEFDEIDAGICEGMRYLDIRKHMPHEYEARSTNKYSYIYPQGESYAMLKERVAQGLRRALFLAGEGTLMIIGHQAINRTLLSLFLFHRPEDVPYTYIPQNQYYHITVTQQKKLFEMIQYA

SEQ ID NO: 198 - protein, 433 aa, Lawsonia intracellularis
MTAIASIWAREILDSRGNPTVEVEVTLDSGYIGRAAVPSGASTGTREALELRDGDKQRYNGKGVLKVVEAVNGPISEAVIGIDALRQVQVDNTLIDLDGTDNKSKLGANAILGVSLATARAAAEAVGLPLYQYIGGTNAKVLPVPLMNVINGGAHAPNNLDIQEFMIMPVGAETFRDALRMGAEIFHTLKTILSADGHVTSVGDEGGFAPHLKSHDEAFQYLVKAIEEAGYNPGSEVMLAIDVAASEFYKDKRYFLTEYKTPLNSEEMIEWLKGFTSRYPLISIEDGLAENDWDGWRELTVELGNDIQLVGDDIFVTNPIMLSQGVEEGIGNSILIKVNQIGTLTETLDTIELAKQSAYTTIVSHRSGETEDSFIADLAVGINAGQIKTGSLSRSDRLAKYNQLLRIEEELEDSAIYYGPVFSESNHSCCDHT

SEQ ID NO: 199 - protein, 523 aa, Lawsonia intracellularis
MDTNNIKTVSQLIIECLEAEGVKYIFGLPGEENLHLVLACANSSIKFILVRHEQGASFMADIYGRLTGKAGVCISTLGPGAINLLLGVADAQTDSTPLVAISAQVGLNRIYKESHQYVDLVSMFKPITKWADIILTPNSVPEMIRKAFELAQTERPGAVFIALPEDVEEMHIDTSLKPLLTRPQHTSYPDPKMLEQAKELIVNAKNPVILVGHGAVRNKASEALQRFAEQLQIPVATTFMAKGILSDRNPLLLGVIGFMKHDYENFAFDKADLIISIGYELQEFTPSKINPNNNKNIIHIHQIAEDEDIAYPITVAIQADISATLNMLCEQLPKNSHTPWKGIANIIQLHKEELEYGESADDYPLKPQRVISDIRKAMKDDDIVLVDTGAVKMWMARLYPTYLPLTCIISNGLSTMAFSLPGALAAKLACPDCKVLVVTGDGGFMMNSQEIETAIREKIPFVILIWEDKSYGLIKWKMDMEIGKHQFVDFTNPDFVTYAEAFGAKGYSITKAEDLLPNTTEST

SEQ ID NO: 200 - protein, 309 aa, Lawsonia intracellularis
MLDTIIGALLPIVITLLLGVLAGWHKDFNIEQATILNQMVMLYALPLTLFSSMVLIPKEQLVSDWGLFFLICIAMIGGFLGVFLISRIVFKQDLGSAALQALAISGPAVPFVGVPVLGYLFGIESAVAIAISSIIMNLFQVPVSLVLLSISTLSESNKNNFYKHILNALRQPVVWAPLLALVFIVFNIQFPTSINDSLTLLGKATGGVALFASGIVLFAQRVTLNFPVVISVISRNIIIPFIVWLLAMLLQLPHEQTMESVLSMAIPTASITVILAVQYHTAEREMASILFISTTLSIITMGLFIWLLK

SEQ ID NO: 201 - protein, 343 aa, Lawsonia intracellularis
MEYFFGGVSLTKKLFHSSALGALDAVSRKEFWASLALKYTKGLGGRTYKKLLTSFGSAFEALQQVKKWKQLGIPSDKSLGILSDSWRAGAKKEWEAVRGCYGTILLWTDPRYPNLLKEISDPPLFLYCLGDISLLENPCIAIVGTRKCSIEGIRVTRAFAKGLATAGITVVSGMALGIDREAHLSSIDFPGKTIGVLGSGINISYPRQNSDVRELLVNKGLLISEYAPGTRPEPGFFPTRNRIISGLSLGVLIVEAALHSGSLITARLALEQNRSVYAIPGAIGSPFAEGCQDLIREGARPIFSVDDILHDLSESLKGFINQYRSLRPSQYAAPANLQIESSS

SEQ ID NO: 202 - protein, 441 aa, Lawsonia intracellularis
MEHTTFFTRNIKKSHKKSIISTTYNEFTSPDITPLTLEDDTFEDTHIDIDKLENLDTIDITTHPLITSPTTNKYEEQIQHTSSNNLPKLLESFSETSSIPTSTALRQTTNLVKHKLPLPSLSLLHSSTENDILPSQLTLKEKSKKVMDCLSDFNIQGELVRVTPGPVITLFEIRPAPGVRVSRIANLSDDLARSLMAEAVRIQAPVPGSDTVGIEIPNENRSLVSFKTLIQSKAFKNSSSPLSMALGKDIEGKSTVKDLATMPHILVAGTTGAGKSVCLNTILLSFLYNATPTDLKLILIDPKRVELAMYTQLPHLIHPVVTEPALAKVALEWAVYEMDRRYNCLARLGVKHFNEFNKKLLSIGNNKPEEFADLTYLPYLVVIIDELADLMMTAGKEVEGSIVRLAQLARAAGIHLIVATQRPSVDVVTGLIKANFPSRIA

SEQ ID NO: 203 - protein, 308 aa, Lawsonia intracellularis
MKQYDSIVVGGGPAGLTAALYLCRSGLSVALIEMLAPGGQLLKTEEVTNYPGFPLGIKGWELADFFSAHLDGYTLTRYNDNVTSFIHTPGENKLTVGEKDIIGKSIIICTGASPKMLGLQRESELRGRGVSYCALCDGNFFRDQVVAVVGGGNTALEEALYLSRIVKKLYLIHRRDKFRANKHYQDKIMATTNKIKLILDSRITMLHGESELEALEVENVKTQVISKIEVSGLFIFIGYEPKSDFLPSELALDASGFVLTDSEMRTNLPGVFAAGDIRSKQCRQVVTAVGDGATAATAAFSYIEQLDV

SEQ ID NO: 204 - protein, 335 aa, Lawsonia intracellularis
MSSEVTVTEHLLLQQQRAPQATGHFTSLFHDLILSAKIISRSVNKAGLLDVLGGTGDINIQGEKVQKLDEFADKVLLYRMERSGVLCAMASEEHAELIKVSAAFPRGDYILIFDPLDGSSNIDVNINVGTIFSILRRKPGKTGDVELDEVLQPGSEQIAAGYFLYGTSTMLVYTAGQGVHGFTLDPSVGEFLLSHTDIKIPDEGFIYSVNEGYWDYWDTPTREAVMYFKQPSSKEKVRSARYVGSLVADFHRTLLYGGVFMYPSDNRKGKMHGKLRYLCEASPLAFVAENAGGAATDGLYRTLDYVPLSLHNRVPLVIGSKKDVEAVANIYAKYK

SEQ ID NO: 205 - protein, 308 aa, Lawsonia intracellularis
MNFDSQPPQITIHSPTPSLHKGSATAIAFTVSKPVAVIGVQLEEKFFPAFQQANGTYYCFFPFPIEFSPKTFNPKLFAQDLAGNKSYISVHVHSLERSFKIDTLTITDTFLDKKMPNFEQNFPDTQTQVERYIKVNSILRIENEKKLIEISKKTSPMMLWSGKFHTLPRAAVKATFGENRTYMYQNQKIDQQFHMGLDLASTANAPIPAANDGIVVYTGDLGIYGNIVIIDHGLGLQTLYSHLSKITAKEGDVVKKGDLIGYTGMTGLAGGDHLHFGFLVGGIQVNPIDWLDPKWIKNTIITRLNNNV

SEQ ID NO: 206 - protein, 303 aa, Lawsonia intracellularis
VEVNPLTFQENLMAYVSMKQMLETGVHFGHQTRRWNPKMRPYIFGARNGIHIIDLQQTVKLYRAAHDKIVETVAAGGSVLFVGTKRQAQEAIATEATRAGQYYVANRWMGGTLTNFSTIQKSIERLNRLETMFSDGSVNRYQKKEILTLNREMDKLELTLGGIKNMERLPQLIFIIDPHRENIAVKEGRKLGIPIMAVTDTNCDPDLIDYIIPGNDDAIRAIKLFVTAMADACIEGEALQKDTKNKNLEEELKQIATAECNKESTSIEQELIIASEQTETKENNIEESVSEVVITNESELITE

SEQ ID NO: 207 - protein, 326 aa, Lawsonia intracellularis
MHTFSNAHVLITGGLGFIGSNLAIRLVKEGAKVTIIDSLMPMYGGTMYNIHDIADKVRINISDIRDPYSIKALVKNQDILFNLAGQTSHIDSMIDPYTDLDINCKAQLSILEACKNNNPSIRIIFAGTRQIYGIPQYLPVDEKHPVYPVDVNGINKIAGEWYHILYNNVYGIKTCSLRLTNTIGPRMRIRDDRQTFLGIWIKNVLCGKPIEVWGGEQLRDFLYVDDCIEALLLAAKNENTFGKVLNVGGKEPVSLQHVAELLIEVVGEGSYIIKEYPMDRKKIDIGNYYTDNTLISDILNWKPTTSLRTALKKTIAYYKPILNEYL

SEQ ID NO: 208 - protein, 342 aa, Lawsonia intracellularis
MDENEINADEAEFNLNTKTGWLNNGNIFISSSHVYFSGARITKHYGDYYTFNNVKVTTCDGPHPAWSISAKEAIVEVDGYAQLYDSTFKIKNIDVMYSPIFTIPAKQTRQSGFLNPNYGISQRRGIYYTQPYFLNIDQSSDLTFYAGLMTKIGPLGTVRYRSHKFTNQKTWFAASGIHDKNNIVTPGKDPVYPSSQLVRNNHQRYWVRGMADGFIGNSTWCYISNLDYVSDQDYLREFDQGITGFSHSRSEMFQMFGRDIQEDDQSRLNALLIRKDWQRIGVVGNIRYEQDPTLGHGNHPTSQSELTQRIPQIDMFLYQGKLCSTSFIRGCHSFTVCLYVSC

SEQ ID NO: 209 - protein, 322 aa, Lawsonia intracellularis
VSPYDFPFLWQPNKVQHWESLYNLTIETIDISEKYIEMLQQRPRYGFGKVLNPCIDCKMLMMNIAYNRMLELGASFIISGEVIGQRPMSQRKEALNLISNRVNIQNILLRPLCAQHLSPTDPEHSGLVDRTKLLAFFGRGRKEQLQLANSMGIQEIPTPAGGCKLAEKENARRYWLVLTKLKNPTVQDFNLANVGRQYWYNNYWLIIGRNKEDNQKLEVLASQNDTLITLKDIPGPTGLARNTTLWDSKILYEAASLVASYSQVAIKKEMPIELQLTSQTESICLTVIPSRTGLFTKECFQFEDVKQAIKNEFHPSIATAVS

SEQ ID NO: 210 - protein, 609 aa, Lawsonia intracellularis
MCGIIAYAGHRPAIPVIIEGLRHLEYRGYDSAGIGFIQGETLYHVKAKGKLNALEKKLSTYSPMLSTVGIGHTRWATHGSPSECNAHPHVNEECGIAIVHNGIIENFHELKHTLSEKQYQFKSETDTEVLTHLIAEGCKQYSSLIESFAWALRQAKGTYAVALISENNPSMVLAARMSAPLILGVGTGEYFIASDIPSFLNYTREVVFLEDNEIISITDNSWQVNDLFTLNPVKKSIQTISWDKHSAQKNGYKHFMLKEIFEQPQVIEECLSERINQETDHIYFPELDNLPIPTRIIVVACGSSYHAGIWGRNILERWAKIPTLPEIASEFRYQELITSPGELIIVISQSGETADTLAALKLAKEKGCKVIALCNVIGSTIAREADATIYTQAGPELSVASTKAVCSQMILLALLALYYSQRKKTLDIQLQQNILSDLKQLPQILQQSLPTIQDKANELAKCYSTSSSFFFLGRGEAYPLALEGALKLKELSYIHAEGYASGEMKHGPIALIDKNFPTVVIALYNNLFSKSQSNIAEIQARNGPVIILTNAPLHSNTYNENHLWTIPNAGFFTNFVTLSALQLFSYEMAGYLGKDVDQPRNLAKSVTVE

SEQ ID NO: 211 - protein, 972 aa, Lawsonia intracellularis
MSYCTNFYIIFSLLKLKRISITHIIYFFYTIVHLFLFIHPSYAIIDLGTLGGTNSQACAISPDGLTVVGFSNTYLGTKHAFKYKLGRMFDLGTLGGKNSTAIASCEFGSIIIGNSDIPGNNHNHAFVYTDHHGLYDLGTLGGKDSTAKAISHDGKVIIGSSMTENGDVQAFIQKMTTFFVNDQIFFTPQGNLINLGTLGGPFSYATDLSYDGRVIVGSSSTPLGEVHAFKHTPLLGMFDLGTLGGTFSIAESVSLDGDTIVGSSTTNQGTTHAFKYTPLLGMYDLGTLGGTYSKAIKVSGLGNVVIGESSICNGNIHAFKYSDSTGMVNLGTLGGNQSQAIGLSYYGTIVVGNAHTFQNKMHGFIHTDQTGILDIGTLGGEESFITGISLDGQIICGYSNTSNGAIHAFIHRTNIADIPPRPQSVIRLQQPLSSPDYTPPDSFSIITSNPSTPTSETSSLSNHTSPPSSPSTSTPLTSYCHHFPSSFYKLTNITPLSSNDTSMVMASPPASPSTSTPLTSYCRHFPSSFYKLTNITPLSSNDTSTVITSPPVHSSNKSYLSTPNSDNSLKNNDCLSPQSSANSSPICGPDSILQRLQAVATKLEIFQQQQQTSSSSNPDQIDGTLQHSSYVSSPQQPSRNSATYHSSNTESPDTSGNFTPPEEEEEEQQQIIQRLGATNPQLNQANSQVSTQTTSSSQQVTPETEVYIHHLFNPRKLVDVHNTSLALELDAAQLSNILANNYEEINQALNSDCNTFGPYGFCLNVGNRYLSTKDSKVSQSIGMVNVAFKFTPYLRIGLALDKALTKYNNQYKIKCSEPLTTLYCVYEQSTQSTGIKFKITGTQRISDVKIARILLPYTEEGKGHTKMKSFGFEAQAGYGFMLSSNWSLQPIVGVQHINITRKKYQEFPQVQFPITYNQAGIQITNVETAALLEGKVYYYSWLNLEKSISALNVEHNSPNGMGNVLLVKLGIH

SEQ ID NO: 212 - protein, 443 aa, Lawsonia intracellularis
MAKPREVYICIECGAQFPQWHGQCLTCKTWNTLKIHNAPSTTAQKIYKKLKPIPIGRVETSTYQPFSTGIKVLDHILGKGLVPSSALLIGGEPGIGKSTLLLQLAGATATLGKIVLYVSGEESLPQIKARAERLTVLHDNLLSMATSQVEDILPLLNTSEAPDLLLIDSVQTLTSSNAEGLPGNVSQVRAVATELVEACKQGKTTVIFIGHVTKDGTLAGPRLLEHLVDTVISLEGDRRHIFRLLRVIKNRFGPNQELLIFQMAQHGLEPVADPSTYFLGARDPSLSGTAVVMTIDSQRPLAVEVQALVTKSYLAIPRRTGLGFDVNRLHLILAVLEKRLRLNFSNVDIYVKIGGGIKLQEPGIDLALVAAILSSFYDVPLPERSVFWGEVDLNGQIRPVGSHSIRLSQASKLGYNPIFYPKHEQSGLATVMELQQSLLKKKN

SEQ ID NO: 213 - protein, 321 aa, Lawsonia intracellularis
MIGKEMQDVINIAITEVNKRHHEYLTLEHLLYGIVSETTGQKIIESCGGNTESIRAQLEQFFSTYLDTLDEAIPESEIPQTLAIQRVLENTIAHIHSSGRTQIEVGDVLAALLEEEESWAAYCLKKQGVTRIAVLEFISYGLPHSELGNDDFVKKAEESSEEKNPLTKYTIELTQKARNGEIDPLVGRDMEISRTIEVLARRKKNNPLYVGDPGTGKTAIAEGLALRIISGNVPEEFTSSLIFSLDMGALLAGARYRGDFEGRIKSVLSELSKQPKAILFIDEIHTIIGAGSTNGSAVDAANLLKPILTSGKLRCIGSTTP

SEQ ID NO: 214 - protein, 471 aa, Lawsonia intracellularis
MASPNIQFDAIPVNIRKPGKYFEFNTRLAVRTLPGNPQSLLIIAQQTGTEPCEPRRIFDADTAGLLFGFGSQIHSMVLAAMHANPYLDLTVLPLADPESGLAATAVVTPSGEAQSAGVVSITIAGKTVSMALAKDDTPSDCAVTLAQAVNLVEELPVVASVTESGVLTLTAKNKGTCGNGITVSVQSSVPGMKCTLTPMSGGQGEPDFQAALAKVFSGDYTIYCVGTTQSEHLKALSDHLASMGAPLEQRGAIGVYAFAGTLEDAITLAESTNSGRLTGAVLPGTPSLSYEVAASYAATIASEEDPARPLNGLTLKGIIPSPISQRLSRTQQEVALKSGVTPLEVGTGEVVSIVRAISTYTKNSEGSPDSALLDITTIRTLDYLRKAIRERMSLRFPREKLSTRTLPKVRSEVLDVLRKMEELEILEEVASNAEGVIVERDIEDPNRLNARIPADVVNGLHIFAGRIDLIL

SEQ ID NO: 215 - protein, 421 aa, Lawsonia intracellularis
MGWNTDLLDAQFRGIPFYVQSITDKGSKSLVVHEYPYRSGGAVEDMGSSARTIPIRAIFWGENYLSNLQKLIEALEQPGPGELIHPVFGSVTVVIKTWQIDHTAQHPDYAEVVFEAIVSALDTNFFTHTTQRTQAEQSSLTAKNAATVLLEHSSQHVTRHIQTNFTSPRVQSQTMQLLMDILDFYDPSGDVPRSTTIFVLHPEAYLAELLAVQKAILEHIPVSSVMKGFPYWSDCFPKITPSCGMKTFEYNEKYPTGVGNCSVQWTSNGSPGVHPQVPSLAIPPNSTIEKYVVQDEIASGCDVSMSSQHIIAIGIILHVILSQTALAILTASQLFLDECTTPTLTPLQLDTIVGNIRARIQDCLVAVRKNVPTQDVHGFSEPLRTAAEAIQSLGTIALNIRPPLITYTVQHEESLHLFIST

SEQ ID NO: 216 - protein, 343 aa, Lawsonia intracellularis
MNTVTTIRDVCPTLCVAGHMHRDWLRYSVDSGFFTPADGWSVSLGLPDGKLPSWLALWAEVELAFDGIVALTGRIDHIRHSVNTKGHSLELAGRDKAGILLDCSAPIFVTQQITLPELIATVVRPLGIDTIDVDTLSTLLFQKSTVEPGMTAWEAIQDAASANGLWPWFTPDGTLKIARPDYSKAPVACLNLRCSGVGNNVLELSVTYDISKQYSTVTALSQSQGNEISQAIPILKSVATDSDTPSRPLVLRKGHIDNTQFLTNIAENIIHEGKLCSVTVMAKVQGHFVEPGVLWEPGQRVTIFSEPHEIDETFFLTKRTFIGGRFGTFTLLKLQQDNVWLST

SEQ ID NO: 217 - protein, 954 aa, Lawsonia intracellularis
MLKEMSLYQVRGYIDNAIILPVYPVRSGTEYIATIESYWNKLLKENVITENEHYSLFRLLEQKDFSLLPGCCYENATTIEQWVNKDKVWILPSLHEAEDILTSMENSWNDRLKRESGFIQPLDLAIRNTLQVKELWCQSTIVHTESLDIDIDDQEEVVELPEKAISSFQMLFPTVAEQDRPWQHLIQAIKKWKQDKYQLILSFSSERSRNKFLNLAEQDGVTPFLEYHPTQQGCFAIISPFRVGVDLSWFNILILGEDVLQPHTGKSRQAPAESFKGLSRYDDLNPGDLLVHKNYGVARFGGLIRMDIGKISNDFLLLEYAGNDKLYLPVDRLSLTQRFKSVNESFPQLDRLGSTSWQASKDKAKKSIEKVAEDIIEMYAWRKVAKGFTYPPVGDLYREFEASFGFEETPDQARAIQDVLADMEKSEPMDRLVCGDVGFGKTEVALRAAFRAASEGRQVALLCPTTVLAEQHYYTFRSRLSGFGINVGLLSRFVPLQKQKEIFKAASSGQIDVLVGTHKLLSDSVSLPNLGLLILDEEQRFGVKHKEKLKKMKKNVDVLTLTATPIPRTLQLSMSGICELSVIETAPPERKPVATAIIKKNKEKLKEILERELAREGQVFWVYNRVQGLEQIVNFVKELVPEARVGVAHGQMPEKQLEENIHAFWHAELDILVCTAIIESGLDFPRANTLIVDQAHMFGLGQLYQLRGRVGRSDRQAYAVFVISDLESLSEQARERLRIILELDYLGAGFQVAMEDLRIRGAGNILGEAQSGHISRVGIELYLEMLEEAVTKLKGEGVTSYPETELTLGLTAHIPQNYISDSHERLRWYKALSSAQSVMARNEIELELRDRFGVLPNELKAFIAVLNFKQFLTESQVIKAEIYEDKIKLVWPEKQTVVSFDKLMLFISAQPDKVKLSPPATLEIKLNTTLPIEDRLISLQEELSVVFSYDSIKQ

SEQ ID NO: 218 - protein, 305 aa, Lawsonia intracellularis
MFNWLYIFIIFTLYYCVFPFSLYAVENFPSGVMAIVNGEPITLQQVEALHDVSGNILPLREKPEVHFLQEQYGDSLYTLIIYTLMSQELGKLGLKVTEQDVLLAENEIKQDYVGEDFEKSLQEEYLDIETWRQLMKQRLTFQRFQHHILRPKFTLSSDEIEEYYFKHYSEFFIPEKVEIIWYQEVENSQQRKAKHKDCDRNDIEQGDIIRVALDRLPAKMRQDLMKIKPGEYTPRHKEGEIYQYAFLRKRYPAHQADIIEAYSRIELILLEQKMEQAYEDWLEQVIPQAKIKVCPQFQPNIIYKE

SEQ ID NO: 219 - protein, 339 aa, Lawsonia intracellularis
MENHIDNSQEVHSALKEIGSLLYQERVKKGYRLEDISIYLKISIHTLQAIEEGTIDSLPHLVYTKGFIRSYAQFLDIPEYELTSIFYRIEHTEKTNDEGEDYPFKKKKFFSPYVWGSILTFLCILAGSWLFYSSDITFSSFDVIAQMTDSGKKEVLPNQKKEENQSEGSLSLPQQQSQENIKSNSSVVVTKIPENFQDHIVIKKELELSSKEDSSSQLSAQLDEKSFSQSTDMTNKSDKSDVSDKSVVEPVHMNKPGKKNIVVLKGLEDCWVHSTADKTETRQFYVQQGQLVALSFSKSLVLKLGNAGGIELKYNGEKLPPVGRSGQVKTITLPLVSQN

SEQ ID NO: 220 - protein, 695 aa, Lawsonia intracellularis
MATFILEIGTEELPARFLLELQSELGVRFLDSLQSMGYRPTEVSDYSTPRRLVVCIKGLDMIQTHCEEVVIGPPINIAFDKDGNPTKAAEGFAKNLGITIGSLSQISTDRGEYISGLKVKGGIPTKEVLARLCPEIITALPLPKRMRWGNNPFTFIRPIRWIMALLDSDIVPFELAGIHSNRNTVGLRNNNVPFIEVPSSTDYYMLLKEVGNVILDPNSRKDSILQLGNKEAQLIGGVVNWNERLLNEVIGLVEHPYPLLGTINSVFLNLPREVLLTSIETHQKSFGILDSQGNLLPYFLTVLNMTPPDLALVKQGWERVLQARLEDARFFWNEDINSSFDEWQEKLTHLIFLDPLGSIAQKEHRVSLLCEWIAKYIPTSNAEEARKAGSLSKVDLVSKMVEEFPELQGVMGGIYARHKGESESIATAIAEQYLPSGPDTDVPVTDLGAILSIADKIDTLVGCFGCGIIPTGTADPYGLRRCALGIIRILIEKEYPINLHQLYTRAQDNFVNVSWKLAPEDVLQKLHEFIIARLKNYFLALGYDTLVVEAIVSTQTSQLWSIKDRLDSFILLSQHEDFSQLVQTIKRVINIIKKQDKETEIVLTGHWNPSLFKDTAEKVLAEKLMIAVNKFNQESQTASLPVFMMLLKLQPAINTFFDQVMIMSNDIEVRRNRLTLLKALLLYIESLADFSVLQI

SEQ ID NO: 221 - protein, 546 aa, Lawsonia intracellularis
VLMMSTNNILSPANGSPVIVPSQDIVLGLYYMTVERSFEKGEGMVFCAPWEVISAIDNNQVNIHAKIKVRMEDGNIYNTTAGRILVWEGLPKGLKFEYVNCVLTKKNIATLVGNAYRDAGIKATVILCDRLKDIGYEYATRAGITIGVKDLIIPATKKTIIDTATSEVDDIERQYRDGIITRTEKYNKVVDVWTKATQDISSEMTKEISTEVVKDPKTERTEVNQSFNPIFMMSNSGARGNQDQMRQLAGMRGLMAKPSGEIIETPITSNFREGLTVLQYFTSTHGARKGLADTALKTANSGYLTRRLVDVVQDVIVYKNDCGTVDGIEVKQVQDGGEIKQNLSERILGRVLLYPIYHPVTNEIIFPENTLIDEYVVKKLEEIGIASVTIRSALTCQSERGVCALCYGRDLARGHLVNIGETVGIIAAQSIGEPGTQLTMRTFHIGGTASREIERSNFEALHSGRIVLTRVKSVENRDGVHLVIGKSGQLSIVDEQGRERERYSLPNGARLYVKEGQEVTKGTFLAEWENHVLLPIVDQQSGLKQI

SEQ ID NO: 222 - protein, 364 aa, Lawsonia intracellularis
MQVISEDQYLQVIEHINEESFVVGMGAEAIRGLLEELNLETLRNSLREESQSTKSQTKKKKLTKRLKVVEAFIESGNRPEWMIMEVIPVIPPELRPLVPLDGGRFATSDLNDLYRRVINRNNRLKRLMELGAPEIIIRNEKRMLQEAVDALFDNGRRGRAIAGTNGRPLKSLSDMIKGKQGRFRQNLLGKRVDYSGRSVIVVGPKLKLHQCGLPKKMALELFKPFIYSELEKRGHASTIKSAKKIVEREELVVWDILSDVVREYPILLNRAPTLHRLGIQAFEPLLVEGKAIQLHPLVCAAYNADFDGDQMAVHIPLSVESTGRVSCAYDEYKQYSLSCKWLTCYCTITRYCSRSLLYDCRTLF

SEQ ID NO: 223 - protein, 341 aa, Lawsonia intracellularis
MLSQYEKQINYIKTIYDSKRGKVTEGDDLPPGVIRMVKVHIAVKRKLAVGDKMAGRHGNKGVVSCILPEEDMPFFADGSPVDIVLNPLGVPSRMNIGQIMETHLGWAAKELGQQLNNMVEQGVAIQSLREQVKSVFESPEISAEIDAMDDDTFRTSVQKLKKGIITMTPVFDGAGESEVWDWLAKAGLPSDGKAILYDGRTGEAFKNRVTTGVMYILKLHHLVDEKIHARSTGPYSLVTQQPLGGKAQFGGQRLGEMEVWALEAYGASYLLQEFLTVKSDDVSGRVKMYEKIVKGDNFLEAGLPESFNVLVKELMSLGLNVTLHQEEGKKKPKRTGLIDKE

SEQ ID NO: 224 - protein, 1003 aa, Lawsonia intracellularis
  misc_feature (333)..(333): Xaa can be any naturally occurring amino acid
MVQLTKQFGKIKVEVPIPHLLNLQVDSYKKFLQEGLLEPLPEEGLESVFRSVFPIEDFNRTSSLEFVNYKIGEPKYDQAECIAKGLTYEAPIRIKVRLIIYDVDSDTESRTVHDIKEQDIYFGTLPLMTEKGTFIINGTERVIVNQLQRSPGIIFEHDSGKTHASRKVLYSCRIIPMRGSWLDFDFDHKDILYVRIDRRRKMPATILLKAMGMGKQDILNFFYKKETYILDNDGRIKWKFDPSLFRKDIAYTDILDNDNNLLVAAGKTITKRVWRQMEASGLEAFEVDPSTVIGQFLAEDIIDTSTGEILAESAEEITEGLIQTFRDAGITTXTVLHTRGNDTSSSIRDTLVQDKIPTTEKAQEEIYRRLRPSSPPTPEIAASFFDNLFRNNSYYDLSPVGRYKLNQRLDNYENATLRTLSDNDILEAIKLLTHLKDSHGPADDIDHLGNRRVRLVGELVENQYRIGLVRMERAIKERMSIQEVATLMPHDLINPKPVAALLKEFFGTSQLSQFMDQTNSLSEVTHKRRLSALGPGGLTRERAGFEVRDVHVSHYGRICPIETPEGPNIGLIVSLTTYAKVNDYGFIETPYRVVRNGYVTDEIIHLDASCEFSEVIAQANASIDSEGRLIDDYVTTRARGDVLMSAREEVTLMDISPSQMVSISAALIPFLEHDDANRALMGSNMQRQAVPLLRSERPLVGTGMEVDVAHDSGSCILAEGDGIIRYADANRIIVSYDDPNLYPEFGGVRAYDLLKYHKSNQNSCFGQRPSCIPGQIVKKGEVLADGPAIRDGGLALGKNLVVAFMPWCGYNFEDSILISERVVKEDTYTSVHIEEFEIVARDTKLGPEEITRDIPNVGEEMLSNLDENGIIRIGAAVKPEDILVGKITPKGETQLTPEEKLLRAIFGDKARDVKNTSLKVPPGIEGTVIDVKVFNRRSGEKDDRTRLIEDYEISLMDSKEQNYIKSITQRMKEKILPLINGKQLGQLYLVKGKEKYLQKKIVP

SEQ ID NO: 225 - protein, 430 aa, Lawsonia intracellularis
VQEESSKELYSKAVKLIPGGVNSPVRACRNVGCEPVFIESAKGAYLTTVDGQELLDFVLSWGAIILGHTNSTVTNAIKKAASNGTTFGAPCKAEVLLAKEIIDAFPGMDMIRMVSSGTEATMSALRLARGVTGRNKVLKFIGCYHGHADPFLASAGSGVATLSIPGTPGVPEVTVRDTLLAPYNDLSTVKDLFVMYGKDLAAVFVEPIAANMGLIPPKEGFLKGLRALCDAHGTLLIMDEVITGFRVAYGGAQTRFDITPDLTTLGKIIGGGLPIGAYGGKAKYMEHIAPLGEIYQAGTLSGNPLVMTAGFETLQLLKDINYTILEKQVATFANELEVILKDKGVPVQVSNFASMFTVFFTNNELKSFDDVKTTNTQLYSILFRSMQKNNIFLVPSPFETNMVSFAHKEKEFEKALIAAKKIMFNITDVN

SEQ ID NO: 226 - protein, 264 aa, Lawsonia intracellularis
MNKYGVNSVAQITTFGKMKAKAVVRDIGRVLDMSFKETDNIAKLIPDDLHMTILKAMEVEPKLQALYNEEPHIKRLLDISMKLEGLVRHASTHAAGVVVSDKPMDEYLPLYRGKKGELVTQFDMKMVEKVGLVKFDFLGLRTMTLIHTTLKTIKDQGKIPPNLDTLPLDDPKTYELLSKGDTDGVFQVESSGMRQYLRMLKPNCFEDLIAMLALYRPGPLGSGMVDEFIKRKHGTVTIEYPLPSLKDCLKDTYGVIVYQEQVMQ

SEQ ID NO: 227 - protein, 367 aa, Lawsonia intracellularis
  misc_feature (50)..(50): Xaa can be any naturally occurring amino acid
  misc_feature (341)..(344): Xaa can be any naturally occurring amino acid
  misc_feature (347)..(347): Xaa can be any naturally occurring amino acid
  misc_feature (351)..(352): Xaa can be any naturally occurring amino acid
MSNFVHLHCHSEYSLLDGAIRLDALCARTKEFGMPAAAVTDHGNLFAATXFYSICKEYGIKPIIGCEVYVTKDHADKLSKFSKARHHLILLARNKEGYHNLVKLVTRGYLDGFHYKPRVDKTLLKQFSSGITALSACLAGELPRTIMGKNIFVEKGGTFDDAISIAQEYASIYPGQFYLEVQANMLPEQQKVNEKLYELAEYTNLPLVATNDCHYLNADDVEAHDILLCVQTQAKFNDTDRMRFNATDLYYKSSEEMEKAFSHLPIAIENTIKIAESCSVEMDFSKNLFPVYELPKGVTPDDEFRRLAREGLQKRLEVYPNKKQLTTENYWKRLEQELDIXXXXGLXRILXXLFKTLLTGQKIIIFL

SEQ ID NO: 228 - protein, 375 aa, Lawsonia intracellularis
MRYHYSLSVILTILLTFSMVTSTLAIPRTEKDLQYIANNLTETPVKYGDIPSITQPEYISVNDANLTLEGRDPVFIVFIPGSQPRIYPQRIMVWHEVVNEYINGKSYVITYSPISGSMAAYESTIEGMNLIFDTEGKLFNSTSVLIDRNTGSLWSQLIGMAFDGPLKGKGLRYIVSWWTTWDKAKEMYPTALVLATPRGTNKPYGRDPYGSYVTHGNYYDDERIVYPVVQQDKKHQLHPKTKVLGIEIEGLPLAIDEAYVKEKKVVNFYFGPYALVALYDSRLDIVRVFNREVWDKQILFTQNPQGLLVDIDTNTIWNYDGIAIQGKLKDASISEFFGINAFWFSWYAFNPESLLVPGSTVVPSSALIKNALFLE

SEQ ID NO: 229 - protein, 335 aa, Lawsonia intracellularis
MMYQSTKSLILYFIKKILWILVVLWGITIVSFIVIHLAPGSPTDLQTTLNPMAGETTKQRLESLYGINRPIYVQYIDWLSRIIRFDFGTSMSADARPVIVKIFERLPLTVFMNVLSLAISLMIAIPLGVLSAWKQDSLFDKLITILVFLGFAMPGFWLALLLMLWFGLDLQWFPISGITSLDFSYLSLWGKIKDVASHLVLPIIVMTVGSIAGISRFMRASMLEVLRQDFILTAKAKGLSTWKVIFRHALRNALLPVITLLGLSVPGLIGGSVIIESIFALPGLGQLFYTAVMARDYPLIMGNLVLGAILTLLGNFLADVCYGIADPRIRQGAIR

SEQ ID NO: 230 - protein, 527 aa, Lawsonia intracellularis
MMFEYLRIQNLALIDDIELEFSSGMNVITGETGAGKSFILKAINFLMGDKLRVDMVRQGKERAQIEALFVHPEKGELILRRELSAATGRSRFYLNDKLTSQNTVKELQPKLLTHTSQHGQQKLLQPLYQEKIIDAWVEHPELFQQKDILIEEIKTLLKKKEKLIYRCQEIEERRDLFESYLYDINKVKPIPNEDEQLELLKEDIRSIAILQKKQLMILQLLQGEEGGLINHLSLIEKNLECFLSIDQSIMDSLPTIIECRQQLNELAQKLQKLSLVTSEKNKNIEEIEARLFELSQLKRKLHRSLPEIFSFKEEIEDKLSFLDSCVLDLRQIEKQYTILIKKLQVILEKIYELRKKAANKFCHALKAQLIDLGFSDYLNVIIDFIPYELFSGCVEHKAQILWAPNPGQPPQLLERIASGGELSRFLLAVVSIQSSEDEGMLIFDEIDAGIGGHTLFKVADKLVSLADKKQLLVITHWPQLAVKASRHFLIVKDINENITFTRCKQLTDFEKQAELSRMAGLSLSKLD

SEQ ID NO: 231 - protein, 527 aa, Lawsonia intracellularis
  misc_feature (137)..(137): Xaa can be any naturally occurring amino acid
MNTNIALLQLHTITGDIIANTQNILQQVSKAKKDGATVCITPELSLCGHPDLHEIPTIISTCINSLQQIAKECNGGPSIIVGSIETTPTNIYNTTFLIQNGQIHTLCKKPFTQFYPSIKKEEYILINNNNNNNNGFXFTSINKQLFLIVTGYKTLINYVCNKIIYQNEQLKKVEAILCPSSEPFIASQIPHFFYELTSISDQLNKPLYFCNQAGEDKNYIFLGGSQCINSQETKNNQSLLFQENYIVVKNHSSVSLKDMSFNSNKLLWEALIHGIQQYVKKNGFSDVVLGLSGGIDSSIVAALAVEALGEHRVHGILMPSPWSSEGSITDAELLANNLDVKTYLLPIHTLIDSFTHSLSELFIGYPPDVTEENIQSRIRGVLLMAISNKFGWMVLSTGNKSERAVGYCTLYGDTCGGLAPIGDLYKTEVYHLAQWYNQSKQKDIIPTSVLTKPPSAELRPGQLDQDSLPPYKELDFILQMLLSKNPTNIDQELLNNPKLNDIKRLIQKNAFKRMQGPPSLVISNFPL

SEQ ID NO: 232 - protein, 465 aa, Lawsonia intracellularis
VMAIPDHPWTGAKDAARVRIAMTTCSLGDKQGILYTSIHEKQQDGFVETHQKVTCISSTEVQSYYTRLQAQRYSLRYEIDGIVMKLDDIQSQEKLGYTSRAPRFAIAWKFPATQVQTRLLQIHIQVGRTGVLTPVAELEPINVGGATISRATLHNEDEIKNKDIRPGDMVIVQRAGDVIPEIVSPILSDRSAKSKPFVFPKICPVCHEKVYRINNEVAWRCINLSCPAIRLQSIIYFVSKSGLNIQGIGQRLIELLVTSGCIKTPADLFTLTTADLLTYKRMGAKLAAKTIQALSLAKQTMSLHRLICALGIRHVGEQTARILASSFIDLDALSSASLEDLQQLSEIGPEVASSIQAFFKNKANIQMINQFREMNIWPIQQVNDTTTKGFFTGKKLLFTGTLERPRAEMKRLAEEAGAIVMTGISHKLDYVIAGKNPGSKLNKAQELHISILDEPTFLQKLLIVL

SEQ ID NO: 233 - protein, 327 aa, Lawsonia intracellularis
MKTGGNSTALGKQVVCFHGHLFEDAEALPLNKEQLAIIYKAAKANWSGVETSIFGTLLERALSPKDRYKLGAHYTPTAYVERLVIPTVVDPVREDWENVKLLALSHVVKGSHKEAIQEIEVFHKRLSETIVLDPSCGSGNFLAVSMNVLKDIEGEVVQSLKDLGLSENEIQKKGYSITPKQFKGIEYNPRAAFISELVVWISYLQRHYKVYGNVQPPEPIMDNIQFIECRDAILTWDSIKKGKDSLGNIQETYINPRPADPWPKADFIVGNPPFIGNNRIRSALGDGYVEALRSAYPMLPKNIDYVMYWWHRSALLLRENKVRQLDL

SEQ ID NO: 234 - protein, 640 aa, Lawsonia intracellularis
MNVLKDIEGEVVQSLKDLGLSENEIQKKGYSITPKQFKGIEYNPRAAFISELVVWISYLQRHYKVYGNVQPPEPIMDNIQFIECRDAILTWDSIKKGKDSLGNIQETYINPRPADPWPKADFIVGNPPFIGNNRIRSALGDGYVEALRSAYPMLPKNIDYVMYWWHRSALLLRENKVRQFGFITTNSIKNPSNRKIVESYLENKPQLSIVMAIPDHPWTGAKDAARVRIAMTTCSLGDKQGILYTSIHEKQQDGFVEVTFNSSQGKIHANLSVDVDTTKLVPLKANKGIAWSGVSIRGKHFIITLDEAKKLGLGTIPGLEKYIKPYMKGRDLAGISKNTYVIDLFGLSINEVQQNYPTIYQWIATKVKPIREKNRLAFRRNHWWLFGSQGIGLRNAINNFKQYIATPRTAGRRYFAFINKLVVPDDSLTVIASDDPYILGILSSKFHSVWLTVTATSRGLKPNTNDVYNKICFDTFPFPQATEQQKNRIRSIANMLDTHRKERQKQYPYLTLTHMYAIMEKVQHNVPLSSKESKISLQGDIYNLLRLHTELDEAVAEAYGWPKDIKTHEALSRLMELYNIQAEEEKAGIIHWLIPEYQKQYDGLVSISDYSQLTSMTKQFLPLFDMNIEKHIIKGNQYTN

SEQ ID NO: 235 - protein, 303 aa, Lawsonia intracellularis
MKQYGVDKPDIRFGLELHDVTSIVHMSEFKLFSHAKLVKAIRVPGGASLSRKEIDDFTEFVKNYGAQGLAWIKINEEEWQSPIAKFLSEKEKEELSIELNVSKGDILFFQAGSPEVVNAALGNLRVQLGNYLGLIPQNTWSFVWVTDFPLYEYSEEERRYVSCHHPFTAPKESDIHFMKTNPAEVKARAYDLVLNGNEVGGGSIRIHQAEIQRHLFEDLGFSLEDIQQQFGFFIEALEYGAPPHGGIAFGLDRLVMLMSNSESIRDVIAFPKTQKGACPLTGAPDFVSSKQLRELGLTLRNKN

SEQ ID NO: 236 - protein, 330 aa, Lawsonia intracellularis
MNQNSYTKPLIECNSLTKHFAIRHGVWQRIQGYVHAVEEVSLTVYQGETFGLVGESGCGKSTLSRMIVGLLHPSSGELFFNGQSIFDSVNKKALRHKLQMIFQDPFSSLNPRLPIGISIAEPLTVLKVSAKKKLESILEILEFVGLQPEQKDRYPHEFSGGQRQRIAIARALIAHPELLVCDEAVSALDASVQAQVLNLLKDLQAHFGLTYIFISHDLAVVGYMSDRVAVMYLGRIVELAPTKSLFERPAHPYTQILLDSIPIPDPFSRKTYRLLKGELPSSLSPPSGCPFHLQCPKVMPICRKELPQLTVLKQTELVEKNRFVRCFLYT

SEQ ID NO: 237 - protein, 1495 aa, Lawsonia intracellularis
MCPLKKNLNETPCSLPTAEIGNKKNDSEENHPTVEQIDDILQETEIEQTNDTLSKASPATNPKFATQKQQVVSILPSKHISLLKKIIKPSQHSSKNRPSSVAKAIIGIPGLPLYAVNLYGQRGDAPSGGDKKPSGTEGNNSSSDDEEKEEKNHSHYDSEINEQDKHTDKGEKSDLVGAVGGTSDNFTNLDGNKSDGSNGFEVLDLPSHNHSEPWQKLIVVDDESSHESHTENSTQKNESDNNAEPKPLKDLYELGEHYPPMFNQPKQDMSMGIIGPGDDLIRPLINFCEPQFQHYKYIHHHHHSHHQHRYHHQQQQHHHHPLHHHYKIGIPLLSPNKNKPGPLMNELPGRHLQTKNPSIDNGGNNNEQQKFDPYKRPSNNSIEDSKKENSHHSNSSKQSSLGLSWEKDFGQSSNRGKNKHLEEQNDGEHSNSSNVSIAPLMSHSSSTGQQNTSVENNQHSNGEQNPPSVGCEHRGPMSTSNHSSSCFVQLNKSGSDFNNESNQPSGPKKEIVQSINSSPESEHTPSNNSSNSSFEKYLHLCYSSVGNEASHSSGESSKNNGNTQEEHTLMPHNNSPPVSQSFYPKNDNESENEASSEYSSSEFSFEKERNFDHFSSENGNSLDGFEVVEHGPGNSAEVSPFKPTVQTGFKGTPSPTRTGLLLPPSSSDDSKSLEGSLKSGGDSNNDESSDWSSSNSFDLTSENKKIFLVQTGGHPHRPPKKNDTKQPHSEPSENPNGEDGGIQQNEPSYGENVLCFTKSSGSNHSHPSHRDHYNEHEQNPPDETEDHSAHHQSQSSLNDKSKSSSKSRSSSIGSNSGSSIILLNGSSSGDSLLEYPGPEDDEGDCLGRECKRKRNSDSNSESDYSCSFERLGNSSASWILRNHGGSHSSTKSNSSSSSSIIILEESSSEHYNNNRDSSYTDSNQGNNFNSYEEDTGHQSEDGGNKSSSSSSIQILSTSNDSIDWPNSRNNSESEYDGVNDGIAWPGSANNSGDEHNSDDGIDWPNPRNNSEPEHDDSDDGIAWPGSANNSEDEHNSDDEIDWPNPRNNSESEHDGSDDGIAWPGSANNSENGDDGSKSDSDSHPEGESNNNDTDGGNRSGNDELSDGYSNSSGSNGENSSLQYRRPVMLGAMPPARATPRRGNPSGANVRQVLSKTPKNLQATQAKRPPISSLDSYRNACKALTQAIHAIAQSSQQAMRSLALATTTGYPDTTKRFRIFGSASTKKPYPKKHQPYAVTVGVIANPFSAINLGVAYTYTQHTTKDFHISNTDALFEGSAAGKLQTNHISLITAWNPEGYGLTGFLEYAYGTGDATLIRKFAYDNLAFTAKGKTRTHTDGGTARIGYRFKVTETIAVTPYGELAAVRARWNNYSENKGKFPANISSTKELVREERLGIETRWQIVDNCQIYAWGAYISSKKKNGVGIEALLTIDDHTENMTVSKYSRKQSMGEIGAAIAIKPTEHFGISFNTSIRTKSNSKVGLDSQYIGTSIWYAF

SEQ ID NO: 238 - protein, 650 aa, Lawsonia intracellularis
MYTQQVACAEDPDLYAEPEDLMTEELLAQHALAAAAIVQGNQNENPEVEQEEFSLLEDLLVALPNLDSTLDDSLASGGHPTSSGEDVGEGASGGIFSQEEGATGGSHLLGLLWDDYEKGPSQEWPEHVQTTTNEVTSLLQKSLESLNNVHQSTVRNRTLSRMSVAAGNIWLTTVISSLQTELSDLMATSRPLRGIFIQKRLVEIQEQKVNQEKLLEELHEVLEEHPQAQRVIQAQEIFLQHLAKLLEKLEALLEIIEPSDSSVEQGRPPGSPPPPGGGAIGFSFPIQTRFLLSYNIQGEISSLQGMQCLLSDTSEQVSTILRMLVLRSKSFNAPAAYPKKRAKQIYKNKSYLSLQNNSKSSLSSTTYRSQLPLLKSFYVSTQWDSYTSNLEYTLRAANVGFLVTPTDMLNVGLTYQHNKHISKEYYGMQKGWSFGAAKAITSTDSLAAVVAWNTGAVGFTGYLSGCCGWGNMKNTRMVTHAGIKTYSKGSPKITLHGGLIRLGYNFQIVDGMLLTPYVESMFVSSGWSPYEEITGLFPAKISGNNEKVVEKVMGLSHSWAITDNMHVQTWVVRSIKKHRMKELRSQVGISRQYTLSIPKRHNQYIRSEVGLSYENKLLETFSIRLDSLWRFDQKNKCKEQQTGFFFQYSV

SEQ ID NO: 239 - protein, 444 aa, Lawsonia intracellularis
MTAYYKKIVKLFPLPNNRNDLFCLYLTAVTLSLYIILRVFKVQSFELSSFVGRIYGLAISEGIDTCKRQSLYFILLLIFTLSFSGIVSVLSNIFSTFSKRFTHDVITFEKAALIGIASMMCVTEILFLMYPSYRLQFYTFVELTLSICGILLIRWFFVLTHQKKLSTLLTLKPSAFGFYFLSLSVYLTIQFLLLSHHKINTPVYIHWPLHTTPFFILGWLISILDKKHLFLKCGAPLLILPIAIIITGEAQYLMLLNDWQVCSKILFLYLLVPLLLLCYCIYQHTTIHKKLIRQNTLMKYWYFPICLTTLTAMLFWHFQWTSRDLLHPANSITPAHGLIAFGQIPFIDIWPTRGLWDYFFPTLFMLFGGQEQATSSFIWNVMPNKVIANLIIYAVFTRFVRPGYALLLVLLLYPFSLFTTYDSLYYAMGLLPALFLPWVIKNFI

SEQ ID NO: 240 - protein, 329 aa, Lawsonia intracellularis
MKIGIIGCGLIGHKRAQSIGDTHQLIACSDLYFERAEKLASMYPHCHAYVSWQEVIANPSIDIIIISTLHDSLSNLTVEALQAGKHVLVEKPAGRNLQELLSIQQAAKASGKLVRVGFNHRYHKAVLKAHELVQAGYTGELMFIRARYGHGGRIGYEKEWRADPHRSGGGELLDQGPHLIDLARWFLGDFTSISGSVQTCYWDMPVDDNAFMLLQTNTKKTAFLHVSCSEWKNLFSFEIYGRQAKIDISGLGGSYGVEKVTLYQMLPEMGPPETTTWEYPMLDKSWATELQEFYEDIQHNRTPAAGIPEAIAVHEVVEKLYKQSGYTFL

SEQ ID NO: 241 - protein, 327 aa, Lawsonia intracellularis
  misc_feature (26)..(26): Xaa can be any naturally occurring amino acid
MQQISLSKRQYSFLAKVTVWLISILXFIYAIYNVNIGQMWTAIKQYSMTSIVLLFLFSIIICIVNGLRKYFLFNKQLSLSQSIQSAFFGLGGNNIFPAKAGEFIHAFYIARVTGKPSTEVFPVIFMERFADINLLAILSLFMLSIFEPSKWTILLTCSAIAFIWLGILLLSYKSSWIFFMLRYIPWEYPRNIANHLCSALHSNLLLHWMIRLFITTILVWVISIGYYYFAFTIVAKLDLTIINTMCASFILCFGAIIPSSPGSLGVFEASAVFALGLFGVPHSEALAIGLVCHFFMFFVPVAGMVIIMSINKQVKQIVLTAEQELKT

SEQ ID NO: 242 - protein, 650 aa, Lawsonia intracellularis
MINHNVEQITQEILTRLESDKSDEIRSAAFEAAELKASDSIPLLIKHLQSPNFGVQEAAEYAIRKIRGVETVQSLIPLLRLEDVAIRNSAIDILQEIGADDLNTLYKLLHDQDVDIRIFVADILGSVGSFSAVSMLIEVLENDTDVNVRYQACISLGKLGYSEAKGALSNALEKDEDWVQFAAVEALTKLKANACVDILLAALPKSSDFVASTIINALGIIGNMLSVPVLLQQLDKSTGPLRNATVKAIIQIIGAPSLGLLGEKDLDKLYTYLLVALEDEDEEIVLVAFTGLSFFQGKEATTRKVFERIQKMDSLHDADLLSAAIKCLIDVGYNSALKEGIFSKNEEVVKVAIEVCGSIGDQDCVGLFIESFWILPLELQRFVINYLVNIADTSNLSFFTEVLSRHTDISIIKAALLFLGKQLSPALSSDILSYLYHPDVEVRKTALEACLALNDEQINKQVIELFFNEDPSLRMLAIYAMGKISPETYVNSLLLALKDSSGEVRRAAIESLGELSKITPELFESISSIVYDECKEVRLALINLAKKIGTQQSLSFIINMLEDSDSWVVIRAIEALIDYKTEEVAVLAIINRLENADVLVTMKIIEALGIIGGKLAFQALLNLINHENPDIQQAVSDALSYIQEEQGEDF

SEQ ID NO: 243 - protein, 717 aa, Lawsonia intracellularis
  misc_feature (146)..(146): Xaa can be any naturally occurring amino acid
VSSITESDFLLSSYMFSLPKTQIAQYPYERGKSRLLVLTKKNSTIIHTDFSKIEHYLPNNSLLIANNSRVFPARIFCSYDKRNIEVFLLTPISFLEIQAKSSDEHYGAWSTAIGECLIRPAKRVNIGSKLYLQQELEIEVLKKEDXGRHIVKLCWKGSLSNIFFSYGDIPHPPYIHQSNKVQDKERYQTVYSRLDKLGSVAAPTAGLHFSETIRNKLQKNGISWAEITLHVGYGTFSPVRCNDIRKHIMHSEFVEVPETTVQAIKKARFEGRPIFAIGTTVVRALEGVSTICGSLQPYTGFINIFISPGYKFSYVDGLVTNFHLPGSTLLMLVSAFTKRSIMINTYNKAINAGPRNIQEPLHSTSRTLEEIAATSQEILCSAMITYILEKKFGTENPQVQKSISEYIQKEWAEDNSTVPISYPAVNSFISSRLVGIYVTKILYNKPEPIRKGVISFLTSSWEKENSGSQPKQESIEQYVTQEIDHWQRTDPLGQTIANLAYGYTIDSEALTEHMQFFKQGILEAIDETWKEDKLTNYSDDGIFNLFTVDAPRDRPSIQGERVFLQSDLPNAKDIYVKMIKEEFPEFSMAAIVTTIMTQKSLPNLSCMVSGIKTYCPLNPYIPNNKDDNDMVPDVVPLIENSDSIQPRMTLTHNNEEIIIHCNYGIKLCCPILDLQQTVGNVQVDIVIPKGQFPLPISNIPNIQVKNMQVNRPVGFVA

SEQ ID NO: 244 - protein, 440 aa, Lawsonia intracellularis
MKEQLRRSLLASQKNFCSNEELQSWFDPLTIKHSENPPSIYVTFPHRFFGSWFANTFQKIFEETSYELWGYGVNFYYDEVTTKEPLYYPIKQNKSTQPTNISQHFDNFIINGKHSWIISIIENILCSVSENILKNTSEEITQLLVLFGKQTTGKTHLLRAIANELSKIPSCSFKYTTTDELAFSLNKEPLFLFREHIQSHHIILIDDFQRVSSYPELQLELTILLDYYKDNKKILIISGTDHPLTWNVSKEIYSRLEVGLWGELPEPDLDIRFRYAQQLSKEKKYILPKEQLLIISQHCHSLRCLSGILHRTIAHKTLLNRELSEKELITLIKQTGEITSISPQLIIMLVGECYGFSANDIISESRQQQLVLARQVAMYLCRELLGYSYPAIGRLFGGRDHTTVLHSVKKIALLQDNDRVIHTMIHELIQKCKNVKNDER

SEQ ID NO: 245 - protein, 394 aa, Lawsonia intracellularis
MIGISKLYCGQVESSDALRYGRHSGKLPSHLLQFSADKKPVVVWNTTRRCNLKCVHCYATALDEEKGADPMSTEQGKALIDDLAAYGAPVLLLSGGEPLVRNDLVELAAYATSQGMRAVISTNGTLITKEKARELKHVNLSYVGISLDGAEEVHNKFRGVPNTFKKTLEGIENCKAEGLKVGLRFTINKRNVADLPIIFDLLRDLEIPRVCFYHLVYSGRGSDLIQEDLSHEETRATIDLIMEKTRKLFEEGYPKEVLTVDNHADGPYVWMRLQKEDPKRAADVFELLQYNEGNSSGRGFACISWDGKVHADQFWRHHTFGNVLERPFSEIWDDPNIELLHKMKNKKEHVKGRCSTCRFLNICGGNFRARAEAYYGDVWAPDPACYLTDDEIKK

SEQ ID NO: 246 - protein, 332 aa, Lawsonia intracellularis
MNTIFFRGRRLRRSIQVRDLIQETRLHSQDLIMPYFVVDTDNSNFFQPIPSMPNQYQLSLSNLEKKVDEAINHGLKSVILFGLPKKKDSYATEAYNENGIIQQAIRTLKKKWPSLHVITDVCLCEYTNHGHCGLLKVEDQCGHVKNDPTLELLTKVAISHAEAGADMIAPSDMMDGRIQALRSGLDHAGFIDIPIMSYSAKYASAYYGPFREAAQSAPQVGDRKSYQMDPANTNEALREVQADISEGADIIMVKPAGPYQDIIRRMYETFPVPIAAYQVSGEYALIKAAGEKGWINEQAVIMESLIGIRRSGAKLIITYFTEDVLKKRWVDS

SEQ ID NO: 247 - protein, 437 aa, Lawsonia intracellularis
VGRFMSLQAEKISLEGHLSRGKDMYKGHPHEQLMGKTSDGSGHPHVNGAHPKSAHPGGMPRTLPDGSPTCKLIAWEVTRSCNLACKHCRAEAHMDPYPGEFSTEEAKALIDTFPEVGNPIIIFTGGEPMMRADVYELMAYATSKGLRCVMSPNGTLITPETAHAIKKSGVQRCSISLDGYNAESHDSFRMVPGAFEASLRGIQYLKDEGVEFQINTTVTKSNLNDFKKIFKLCDELGASAWHIFLLVPMGRAAEIAEQSITAEEYEEVLHWFYDFRKTTSMHLKATCAPHYYRIMRQRAHEEGVPVNVDTFGMDAMTRGCLGGTGFCFISYEGQVQPCGYLTMDCGNVRETPFPEIWKKAKTFQQFRTQSEYKGKCGVCEYHKSCGGCRARAWSMDGDHMGEEPLCTYQPKRYLKQKNSSQPIDHQGITPCARGHMG

SEQ ID NO: 248 - protein, 453 aa, Lawsonia intracellularis
MNSKIKSIYMVGIGGSGMSGIAEILLNLGYEVHGSDIMESHIIHRLRKLGAIISIGHQAENLGDISVVVKSSAVTEDNPEIQLARQHGIPVIPRAEMLTELMRLRKGVAIAGTHGKTTTTSLTATVFDTAGFDPTVVIGGVLNAYGANARLGQGQYLIAEADESDGSFLLLLPIINVVTNIDLDHLDYYRSFEEIEHAFVTFMNNVPFYGMNVVCGDDPGVQRVLPRVNRQVITYGFESSNHIWAEIIECGIINRFKVIAHGECLGEVILTQPGKHNILNALAAIGVALEVGISPKCCIEGLANFKGVGRRFEYKGEKNGITVIDDYGHHPIEVAATLETARKVFPDRRIVVAFQPHRFSRTQALFGEFCQVLSTVDKLLLTEIYPALEKPIPGINSQNLAQGIQQISKIDVTYYPDIDAVFHALPHVLCAGDVLITLGAGTITTIGPKFLTC

SEQ ID NO: 249 - protein, 363 aa, Lawsonia intracellularis
MKYRIAITTGGTGGHVYPALAVAEQFHDKADLFFIGSQYGPEAEMVKTFNIPFYGLPVRGVLGRKWKAFSALYSMIKAIVKARKILQKCMPDIVVGFGSYASFAPLVAAKLKRIPTAIHEQNVRPGLANRMLARLADRVFLSVPDTLHIFTKKSKVRYTGNPIRQSIVDLHYKFEDTKNSSTRHLLVLGGSLGAIAINSIVVDGLSRLFSNRIVIRHQTGVHDWERVKEGYALYGRTNSQVTPFIDDMAEAYQWSDLVLCRAGATTIAELAAVGKPSILIPFPYATHDHQTYNAQFLVRVGAAVLIPEKNVVEVDVIEKIIALFNDRVTLVNMALAAHKHGRIDAATCVANEIIDLLSANAMK

SEQ ID NO: 250 - protein, 382 aa, Lawsonia intracellularis
  misc_feature (155)..(155): Xaa can be any naturally occurring amino acid
MSIVRQHRRLSGSNRHKDDISDIASYDWLLLTVVLILLCIGLIMVLSASGMVAERLTGDKYYFFKRQCLFTIISGILLWVMAVIPRSLIYKLQYPFLFVIIGLLFLTITPLGAKVNGARRWISLGLFSIQPLEFTKIALALYLAYFMSTNQELVXTFSKGVIPPFAVTLILAIMLLVQPDFGGAMILIMILFFMCLVGGTRFIYLFLSIAMSCTIAAALVWHSPYRARRLAAFLNPFQDAQNTGYQLIQSLYALGSGGFWGAGIGGSNQKMFYLPEAHNDFIMSVIGEELGFLGITIVMALLFLFFVRSYLIVVKQRELRDRLSAFAVTLVIALGCILNLAVIMGMAPPKGVAMPFLSYGGSSLLATMCCVGLLLNFSRIGR

SEQ ID NO: 251 - protein, 388 aa, Lawsonia intracellularis
  misc_feature (364)..(367): Xaa can be any naturally occurring amino acid
  misc_feature (369)..(369): Xaa can be any naturally occurring amino acid
  misc_feature (371)..(371): Xaa can be any naturally occurring amino acid
  misc_feature (373)..(376): Xaa can be any naturally occurring amino acid
  misc_feature (380)..(380): Xaa can be any naturally occurring amino acid
  misc_feature (388)..(388): Xaa can be any naturally occurring amino acid
MLSIANNCCISLAQNEWPLYKVAVVGTGRSGMAAARLLHSLGASIRIVDKTRENVSKTFMDWIKQTNCEVMFGEHCPKQFEDIDIVIPSPGVPLNLLKPHFLNTIQVLSETELAWYQLSNEKVIAITGTNGKTTIASLCAAMLVEQGISVFVGGNIGTPLSEYVLCKKKVSVVVLELSSFQLQTCSLFRPDIAICSNISINHLDYHRNMDEYISAKLNICKNQCESDLAILKPGMEALVDSYNLKARVVFYRDLGNFSTSRLLGVHNLENAEAAWLACKELGVTEEIAKKVVTTFEPLEHRLEQVRLLNGVLYVNDSKGTTVEALRAALESFKQPILLLAGGRFKGGDLTSLRPIIKKQVRPIXXXXGXAXSXXXXRCLXRYYPNNLX

SEQ ID NO: 252 - protein, 358 aa, Lawsonia intracellularis
  misc_feature (99)..(99): Xaa can be any naturally occurring amino acid
MLYNILFPLSSDYTILNVFKYITFRSVWSLITALILSILLGPYFIRWLQRINFKQQIHEDVKIHKSKTGTPTMGGVLICFSSLCSTILWSDLTNIYVWXTLLVFIGFSFIGFLDDYIKILHHQNKGFSAKVKLLAQVVVAGIAMLFLVSEPAYSTKLAFPFFKSLHPDFGYFYVPFAILVMVGASNAVNLTDGLDGLAIAPVIVSIFVLSVYIYVTGNVKFSQYLQVDYIAGVGEVAVFCGALIGAGLGFLWFNAYPAQIFMGDVGSLGLGGVLGFLAVLCKQELLLLIVGALFVLETLSVIVQVGYFKWTGGKRIFRMAPLHHHFELKGIPESKIIIRFWIISITFGLIALSALKLR

SEQ ID NO: 253 - protein, 464 aa, Lawsonia intracellularis
  misc_feature (395)..(395): Xaa can be any naturally occurring amino acid
MRLSLDTILSVTGGTLVAPTTGYNSYIDGVSIDSRAITTNSLFICISGNITDGHNFVLKAVEEGASAILASHNPFEGEVPVPVILVPDTLNGLKVLAQAARKMTKAKVIGITGTAGKTTVKELVAQLLTSKGKVAKNYLNFNTQIGMSFSILAAQGDEDFWVMEVGISNPQDMEELGTILTPDIALIINVGPGHLSGLNKQGVAYHKAQLLRYMKDEGLGIVSLDYPDLVKEVKELRSGSLFFSVLDNQCRYYSKYTGIVENGYGTYRLWLDDDIVDVTSPFLGNFGMESVLASATIAHKLGVSSDSIKQQLFQAILPQNRFSCFTHGNWLCIDDSYNANPLSMNAVIESTYKLSDEKKPLVYVLGEMLELGDSSEAEHEKIGKKLAQTGASIIXWKGGMIDNVLIGLKGGGFKGILEKISTEQEFQSLFLKHRLDEGIIVFKGSRSNKMEVFVDVFMKLVGTK

SEQ ID NO: 254 - protein, 529 aa, Lawsonia intracellularis
  misc_feature (227)..(227): Xaa can be any naturally occurring amino acid
MKIPGVMLLKEYERVYPYKHVAGQLLGFVGVDGNGLEGLEHSFNDYLSSFSTKQLVMRDASGRRFYINNGEELHNSTRELQLTIDLQIQSIAEDAIAQAVSEVGAKWGGVLIVDVKSSEILAWSQYPFFNPNAYRQYKPSEYRNRLALDAFEPGSTFKPFLIAAALQEGIVTKDTLFNCEGGVWKIKNVVIRDDGTPQKELSVTKILSHSSNIGCGKISLELGSQKXYYYLTKLGFGQPTGLNIIENKGILRRPREWSEADLISTAFGQSLSTNALQLTQGFLTIATHGIYKPISLFKTPLKKVSEQRIFSEDISSEVLTMMRQVVESGTGKRAAISGVSIAGKTGTAQKVDKTGKYGQERIASFVGLFPAEDPHYLIMVVIDEPITKKYGGVIAAPVFRKIATKVMAYVGSPESLQYQVVTKEEEKISSNKVSSLVRTNKKEKSCSNTLEVRQKIDRKDPIEYATSLKIPDVVGKSIRKAIELFAGQGLVPEVKGNGIVVIKQEPEAGTHLIKQHLLDKKCILWVSEK

SEQ ID NO: 255 - protein, 321 aa, Lawsonia intracellularis
MNELLASLHQPTMSESTMYTSCYSGIFGYLFGWGSQKVSSGKEENDVEQTPEKITEEKVKAVAGIGTLGSDAELEEGIFSDGADFSSTILQVMSDSELSNDIEQVTEQVEYKGVVSRGSECDEIGEPMDESHVPEKIMRLFERATFVDKDSSSGKEGDFSSEERKSSSYRNRYYGVEKRRKLRKIHLKEKAQLEKQLKEPEEKIRLQLEQRQQERRRKNLMFGYHISEDFLDKLEEDEYKTSFEPFNKLRAELEQKQAQERLSLQAALKKEFEESCQQDSEDISDPEVKQKKKEERDLLVALIEEAAGDIQDVEESLGFKL

SEQ ID NO: 256 - protein, 669 aa, Lawsonia intracellularis
  misc_feature (665)..(666): Xaa can be any naturally occurring amino acid
MRDPFESTSCYYPSGSDAKSESSEQGFYSSNLETENNTFLFNRVSPPEELQYGKKKSTLPLQKRTSCKKNKKWKSSYVVDDKQRAQSKMELQKHQYYITDCLLRLEKLHKHQYEVAKKTGDDLCSLEKKQAKDKERLQATLNEQYLDLLTKHQQLIARNTHPSEESLSEISEGNIEDAESSESDLERKHQAKKKRLNKKLKKLLVENYTIGRNHRQSVEETTTKIDKRHAQERCHWTTKKGPFSQCLMLQTEELWAFYNEKEKEREKIEAEKKENLKKYKQEKAAKQSYLGWLFGWKKAASESEKEKSSSEDFKTSSDSELEIKEVVSLSDKEHSEFDHSDNYEYDKSKPKCYISTKERNKRHKKSLQRDSRLTAGLSLGAPRQIMYQDKKDEKSDDDKKVSQGNESPQVTKESTVDGKKEVSAFEENLKSDEGLSVGDITFELSVLSGATGGDEDPLGKDKGSHEQEKEQKKDQKKWSDKKKKKWLTFKADQKKCPILTKEKYWSICCDNLLELHNRHEKEYKEAEKNASNIELLLEKQSQEQECLRSELEELWKQTREAQASSSSESSGSIVSSDIRSRGGYDIESDVDQETSNKRARDKQISKLQKKQQRERKTLLAMQRTKQEQLDEIQEERRRKAKRLGMSLVELNLMQQEQKEMLHNQXXTAS

SEQ ID NO: 257 - protein, 339 aa, Lawsonia intracellularis
  misc_feature (26)..(26): Xaa can be any naturally occurring amino acid
MYTLFSQQYNEEQDCHREKEKKLEEXLMLHKQERDIFFIPVSDSTEKGTVEGRQEDYSDINKDRRHSTPSIPVTALNIFIEDSSKSTPGRLEHQDSYSNISNEPKSLSSDLDVYNNRDVVSSIPLSLINPDEEATVEVSASESLTETSIQVGPFPSKTSLLKYFNRVMNEEGFGSIQKYYRDDLYLPGCAVYQTAKKEHKRKHSGIRLPWLKRFNLSSKTKTDLQDESLQESSPPKSLREDGIYPPLLQHKRPSVYYTKEVGAGDDTPHSLKHVKYRKKRVGGILQSPEIPDFCKIEKIFRSLPSSEEEQESELCPSGPQGKIYLFTLGTQGSEPGYVL

SEQ ID NO: 258 - protein, 396 aa, Lawsonia intracellularis
MLYFYIMAITTPKSLFYSTPECLRTIQVINVRWFNATAWYALELSRLLIKAGHKTLVLTLNNTETHYKAVEMGLSPIPLPLNTKCPFIFFKLIQSIYQQIKVFKPNIVNCHRGEAVFLWGILRKKGNYALVRTRGDQRLPKRNIFNKLLYRSMTDAIITTNTKMSSHITSLLNVKESLIDTIIGGVDNQRFYFSELGRRIVRSKYGFTANHFVIGLLGRFDRVKGQKELINAIALLIQEGYTSIRLLLIGFPTTISKEEVEVWIKEAKIEPYVIITGYVQSITDYLSAMDLGVIASLSSETIARAALEIIACKRPLISTNVGVMPDLLPLEALVEPGNILALKKVIQKAIVNSSWRKWLVDISSNRMKSQTSELFLSETLESYSKALSNRFHAVYG

SEQ ID NO: 259 - protein, 410 aa, Lawsonia intracellularis
MAHTNKHYLDLPGSYFFTEINQRVNTYKKTHPEKSIIRLSIGDVTRPLVPAVIKALHDATDEMGQPSSFHGYGPEHGYEFLIGEIIANDYTSRNVHIEADEIFVSDGTKCDIANIQELFDPSDTVAIIDPVYPVYIDSNVMSGRLGKLINGIWSKLIYLPCTIENNFIPELPTQHPDIIYLCYPNNPTGTVLSKDQLTIWVNYAKKEGAIILFDAAYEAYITDPTIPHSIYEIDGAKEVAIEFRSFSKTAGFTGLRCAYTVIPKELKANTREGNEQYLNMMWNRRQTTKYNGCSYIVQKAAAAIYTPEGQKQIQESIQYYMKNALIIQNAITQMGITAVGGINAPYVWIKTPDNLSSWDFFDLLLQNAGVVGTPGVGFGPHGEGYFRLTGFGSYEDTNKAIERIQKALLI

SEQ ID NO: 260 - protein, 441 aa, Lawsonia intracellularis
MYNRVNFIIWLIATFFIVFFSIAEEVKAEERLIKMVILSRHGFRPPVETHEFLEEWSEKQWPYWPVKDGYLTQRGSVLISILWEGLHEDPWMKELFPRNICPDPQSIYVRSDTMERTQATAIAILNGFASGCDFQYRVLDTTEGDPLFTPLETGCCSLDFTKVIQEFNQQYGGVQTLRKDLEEPLKIVADVLGYCPEATCKKYGLSSECSVLDIPDTIILNKHNGVHLTGGLGISALSAALFFLELGEWPKGNLSGINVSQDIVKKVFPLQTKIFNAIHRIPEMATVKASGILKTITDALTNSDTDSDVNKAKLVIFVGHDTNIANIAGILSVDWDIPGYPSGATPPGGMLVFTLWETPNGNIVKAHYICQSLETVTTPSIYPQKIYKQQLYSVSPTTSKKVNKEPFEYSEKQFKEWVYRLVKKDCIIKETRPLISKRTLY

SEQ ID NO: 261 - protein, 418 aa, Lawsonia intracellularis
MNYPPETQYEALEKRGVSRRDFLKFCSFAAVYLGLGPTGHLDIANAMENKPRLPVVWINGLSCSCCTESFIRSAHPLASDIVLSMISLDYQDTIMAAAGHQAAEVFEETITEYKGRYILAVEGNAPLADQGMACFQEGRPFLETLKRGAEGASAVICWGTCASWGCVQAAHPNPTRATPVPKLIHDKPIIRIPGCPPIPEVMSNVVAYILTYERLPELDSQKRPAMFYGKTVHDQCVRRAHFDAGQFVESWDDPAASLGYCLYKMGCKGPTTYNACPVTRWNDGVSYPIESGHGCIGCSENDFWDRGSFYDRITTIPQFGTNTTANTVGLAAVGAVGAAAATHAAISTAVHLKRKANAKVEEENAQPHTCCHSHQSTDNTTAHTCCSNSADEKTQNTTACCHSKNVMNSGNSNETTDS

SEQ ID NO: 262 - protein, 602 aa, Lawsonia intracellularis
  misc_feature (523)..(523): Xaa can be any naturally occurring amino acid
MSYQYSTQGYEVTDAGKRIVVDPITRIEGHLRCEVNINSSGIITNAVSSGTLFRGLEIILKNRDPRDAWAFAERICGVCTGTHALTSIYAVENALQIEVPANANFIRNMMQLALWCHDHIVHFYQLAGLDWIDVVSAAKGDPKKASELAQSISSWPMSSPGYFADIKKRLVDIIGSGQLGIFKNGYWGHPAYKLPPEANLMLVAHYIEALNMQKEVVKIHTIFGGKNPHPNWIVGGMPLALNLDAKGGADVINMERLEYVQRIINICKDFTSKVLMPDTIALGKFYPEWLSIGKGISHLSILSYGGFPTISNDFSNDSLLVPNGAIINGNFNEVHPVDLFAEDEVREEVSHSWYRYPNDITSLHPFEGETIPEFSVGPNTKGTETDIKELDERARYSWIKTPRWKGHMMEVGPLPRVLIAYYMKREETVTAVDEICRQLNVPVTHMCSTLGRIIARSHEAVWAAEKLQYFFDRLIANTKAGDLTVANTTKWEPSTWPKEAKGAGFTEAPRGALGHWVVIKDTXIDRYQCVVPTTWNAAPRSDSEQLGPYEAALMDTHLAEPEKPLELLRTIHSFDPCLACATHIIGPDGNEVLSVQCNTAGC

SEQ ID NO: 263 - protein, 431 aa, Lawsonia intracellularis
VLGKCDSHTDSRSSEGSSSEKNHSTITQTQQCSNTEKNKLLGVDKTTAFLLPGYNYKGQVCSLFGIQHMLLDTSKRISTTVKMLGMKACSSNITANEHTRFGSHFRRLASKKSKHIFSGITNNIPYRITTSLDSYCSNMEYKAASGQMGVLFDLWPTLTAGFIYGRHNDRVQKTNGMQGDLKSSSVSTRKKLDSLSAVVAWNTKKNGFIGHIVTYYGWGTVTNIRSVPHADCMVKTKGTSEIQSIAGLIQLGYNLQLSSEIVCIPYVEYMFSSIRCAGYQEYTGIFQRLISLHLEQQVTLIKSGHERLYAETLNFFQKNTHLVEFYHFNNQIDICSGVMFNLGFLPKSDKKIVTQPTTTIMALNNALNVLAPGGIITIHCYTGHLGGVEESEAVLYWSEQLSLNKWDITIYKQIFKQKNNEQLVLIKRKQL

SEQ ID NO: 264 - protein, 323 aa, Lawsonia intracellularis
MLLLLTMRHIECLTMRKLFMDLDKPLELVEIHAAIVDIDSEFKRDLGFTLQQGSSKKSMTMGGDFSTTQQSLPLEITKGTVEGGGLTYSTIYSKGVEFFLARVQALETEGEARVLGKPSVLTVDNIQATLENTSTYYIQVQGYQTVDLFKVESGTVLRVTPHIIYNNDGTKSIKLVVAIEDNQNDNSTDPTVGSNVVLPPIKQTRINTQGVVNTGQSLLIGGYYYEQQGVNDKGIPILKDIPIIGYLFKTNTKTSKKMERLILITPRIIMPNTVTPIPAHVDDPSFHRSAVQDTYDDIKPKSSTGGGCSRKRRAPVIEEQRLG

SEQ ID NO: 265 - protein, 303 aa, Lawsonia intracellularis
VDRPMWIQFDYYMKNALRVILKVLFYILLWSILFIHLVSVSKAETLFSYLYTHYSEQESLGSLLTDFAFTQGYSAIISPAVRGNVSGFFKDENPYQFLEGMRSAFGVMWYMLGKTMYFYTQAELQRVFISPQVMTVERLYHILLNSSVISPQLPIQLNGDMIILSGPPHYIEQVLQAVSIFEVSQLSNITMRVFPLKYASADDIVIQSMDKTVTVPGIASILRAMLNGQQETATTIVEQPATVNKLNGEGLASKGKEKTEKGNEVKQQAAGVNIMADPRMNAVVINDAAYRMPYYEEVIHGFG

SEQ ID NO: 266 - protein, 367 aa, Lawsonia intracellularis
MPFSLTEEDTEITFHGQMPLWVNWNQSFYPVQTSLSPTLIKELVANTPIVPQDNISEFLDRVWTRLPSSELYEPEEFLKIMEPIFQPASYDPKLFLDEEGSLLTLEVQNTYETIHGEFTLPGPNPDFQTGSYIFEGHTFLIRRDQQEESALITQLSEMHFQPRSNKLWFMEPEEAIAFLLDSYPTLVENWRVYGEKALTRYKVRIAQPVITAKVESNEKEKWFNLDIDVEYDGQHLPLERIWKAWVRGKRYVQLKDGSYTSLPETWLQKLSHKLHALGFDPTKPPKHQFKQFEAPVLDTILDELPNSETDSFWNSLRNKIRSFKEITPIETPKGLNATLRSYQLQGVSYLNFLSEYGFGGILLMKWD

SEQ ID NO: 267 - protein, 409 aa, Lawsonia intracellularis
MFYPTSILVTGFDILFFWVARMMMFGLHFMKDVPFRHVYIHALIRDSEGRKMSKSLGNSIDPIQMIEKYGTDALRFTLTAFAAMGRDIRLSEERIEGYRHFMNKLWNASRFALMNLPTDSVQLVSIEEITALHHKWFLHRLEEVKIDVNDSIKNYRFNDMAQTLYKFFWNEFCDWYLEIIKIDFKEEGLHKTQAQYVLWLGLKELLILLHPIIPFITSEIWKALPGHTQELACEPFPSTRSHCLSPNEANQMIFLQEVISAIRTIRAELNISPSYKLSVLLRPIDSIQLSLLQKNSNLIITLAKLETLTIDSNQKAPGPSANHIIQHCEIIVFLSGAIDFNAEYKRLTKELNKIDTELQKITERLKNKNFIQNAPKEIVQKEQARKDELLSSHQKIYVLMNQYLNNIDK

SEQ ID NO: 268 - protein, 353 aa, Lawsonia intracellularis
MGIQKIQAAIIGGTGYTGIELIRLLSLHPNIQPIFIISREQCGKKLYEVHPFLSGMPYAETIFSPLDHKAIGKTCDVAFLAVPHGTGMEIAPQLLEQGTKVIDLSADFRLNNPMTYSQWYHLEHNASHLLSEAVYGIPELNEEFIKRANIVANPGCYPTSIILGLYPAIKHGLIKFENIIIDSKSGTSGAGRNTSTSSLLFCEIQNSFKAYNIGIHRHTPEIEQELSYIAKQPITVTFSPHLLPTTRGILSTIYTQLALPISQDEVYRLYTNTWKDQPWIRIVPSSKLPETRNVCGTMFCDIGLVVDIRTQRLIIISAIDNLCRGASGQAIANANLMFNLPMTTGLIFCPLLP

SEQ ID NO: 269 - protein, 868 aa, Lawsonia intracellularis
MNIKEFFSEDPIYLMDGSAFIYRGFYANQSMQRSDGFPTSALFNIGRIFLKILREEQPKYFVFVLDGPGTNFRHTLFPLYKAQRSPAPEALIKQIEPIKRLVISLGLCLTVASNSEADDCLASIAHRYRDNYPIVLIASDKDLKQCLDKNVLMWDPASKAEKITTLKSFKEDEGLLPSQWPDVQAIIGDSSDNIPGIPGIGLKTAKKIFQDFPSLESIKDNFSSLPLPVQKKFDGHLDAMFLYRQLTTLSTTECIDLQIDTIKVGPINVQETLTILREFELVSLEREFMAVVHQKKLIDPKGIIESGTSSHGQLSLFGSSKPINKIYCSTASDLPSVKGKIVALLTDKHEVTLAVENTEYFYTGPLLPLTKALNQSRHVVTPDLKSLLRTNGIWRTIPNTHWIDLGLATYLLDPEERDYSWPKLVARWGSVFGLSAGNPGLIALKVWEQLRNKLKTAQLLELMDSLELPLIPVLADMEAVGVVLDDQNLKIFLVEVQNSLDHLTETIYHEAGGSFNIRSAQQLGDILFNQLELPAAKKTRGGQASTSQEVLEKLSGQHPIIDTILEYRKLEKLRSTYLEPLPRLIGKDGRVHTTFNQLATATGRLSSSNPNLQNIPIRGSLGQRMRSCFTASQGNLLISADYSQVELRVLAHYSKDPTLLTAFLEGADIHTRTASLLYEKSQEEVTADERRNAKTINFGLIYGMGPQKLAQELNTTLNEAKKFIQRYFEHLQAIKKFYDQVEHSAKEYGYVTTIAGRRRLLPDIHSENIQLQALARRQAINTIIQGSAADIIKIAMLTVHGDTTLAKMDAQLILQVHDELVVEAPEDNAKEVGKRIAMLMSNVTPGGKPLIVPLVTQWSIGYDWGSAH

SEQ ID NO: 270 - protein, 322 aa, Lawsonia intracellularis
MGNPIGSRNNGLNKKNKDEHFEDESSGNAKLWLALIFIIISAGVILLFWFVRGSVFQKDEVTTEDTQNMIVNNPSEAYEAMKEKLMKDIESSQSKEKEPMLEEVIEESISPPPPASTFNNYEQGSKHIFRDKDETGASERGIFSTKSTHPVHTKRDKKDDTVVRDRGYLTGAIPGTPVITQDGIVGRVFRAGPTTSTVLLLIDPGSRIAVVSQKNRVQGILVGSGAMSPLEVRFVSRNRSIEPGELLVTSGLDEAFPKGIPVAKISKVTDSDMSPFQTVEATPLVPILNIEELLLLQQPVYHNQNFSSIDDVQQTESVSVLK

SEQ ID NO: 271 - protein, 597 aa, Lawsonia intracellularis
MKLKLDPEGYQPPRSGILLLQFLIGALFFVFVLRFWYLQIHKGTEFARQAQNNRLRNERVYASRGLIKDKNGILLAENRPAFGLALVREDCPDITTTLAQVSVWMDTPLEQLIAKFNQDKRKVKPFEPILLFTDIPFEQVAKIESQLMHWPGLITVAHSKRYYPQSHEFAHILGYVAEANEKELAMDKVLSLGDTIGKQGLEYILEPRLRGEKGEYSVEVDVLGRALGKVLVKAPQHGEDIQLSLDAQLQQKIVSLLDTHAACVIVIEPHTGRLQALVTTPAYDNNLFVRGLSQKNWEILRDNPRHPLQNRTIQSTYPPASIWKLLMIGLFLEEGIAPSTHITCTGSVTLGDHIFRCWKKHGHGSVDMKRSLTDSCDVYFYILGEKLGIDKIENFAKACGFGSLTKIDLPYEKVGLVPSRSWKRSRFGDNWYKGETLNTSIGQGYTLTTPLQIAVFVSSLINGGNLMKPLLLSEDKPQVLGKIPFSEETLAFINNTMRLTVEKGTARVLRRNDAIIGGKTGTAQVVKLKMVGERRLKADEVSYMERDHAWIASWGKKDDQEVVVVVMIEHGGMGSSTAGPIARKVYDILFSTKQEHS

SEQ ID NO: 272 - protein, 371 aa, Lawsonia intracellularis
MEPIDRRLITHINWGLLAYTGILFFIGTSNLYSASGIRLENGITLSPFYQRQIVWGGFGLLAMIVSMSFDYRKLQSLALPFFLFTLFLLILTPILGKTIYGAKRWIPLGLFNLQPSELAKLAVLIMGARMLSLDGAPLSWAQLIKMLIIGVIPAGLIALQPDLGTALTVFAILGGMVCYHGLQPHVLRICLIIIPLLIPLSWFFLHDYQKQRIVTFLDPTKDPRGSGYHIIQSQIAIGSGQFSGKGFLQGTQSQLRFLPEKHTDFAIAVFGEEWGFLGCITLMGLFCLFLLGIFNTVKGAKDRFGSTLAAGIFMYFFWQFFVNIGMVLGLMPVVGIPLPFLSYGGSATLVNFILIGLVLNISMRRFVFKSY

SEQ ID NO: 273 - protein, 364 aa, Lawsonia intracellularis
  misc_feature (14)..(15): Xaa can be any naturally occurring amino acid
MNPLVTGIKAIDAXXPIGRGQRELIIGDRQTGKTSICIDAILAQKESGVHCFYVAIGQKASTVALVADTLRKHGAMEYTTIIAATASDPAPLQYISPYSGCTMAEYYRDHGQHALIVYDDLSKQAVAYRQMSLLLRRPPGREAFPGDVFYLHSRLLERAAKLSDELGGGSLTALPIIETQAGDVSAYIPTNVISITDGQVYLEPNLFNAGVRPAINVGLSVSRVGGAAQTKAMKQVSGTMRLDLAQYRELAAFAQFSSDLDKETQTKLERGARLVELLKQPQYQPMQLPEQVIVMFAATKGFMDDIPIDHIQNFSKTLIEYIQTMNPKILENISTQQALNEELDQQLTTAITECKKTFLPMNKR

SEQ ID NO: 274 - protein, 471 aa, Lawsonia intracellularis
MSENIGKIVQVIGAVVDVSFPNGKLPPILTALEIHNPNSIDAPKLICEVAQHLGDDIVRTIAMDATEGLKRGMDVLDTGHPIMAPVGKASLGRIMNVVGQPIDGLGVIDTKTYLPIHRKPPSFLDQNTSVEPLETGIKVIDLLVPFPKGGKMGLFGGAGVGKTVILMEMINNIARQHGGISVFAGVGERTREGNDLYHEMKEAGVLEKAILVYGQMNEPPGARSRVALTALTCAEYFRDEEHQDVLLFIDNIFRFIQAGSEVSALLGRMPSAVGYQPTLGTDLGSLEERITSTHNGSITSVQAVYVPADDLTDPAPATTFSHLDGTLVLSRQIAELGIYPAVDPLDSTSRILEPNFVGEEHYTVARGVQKILQKYKELQDIIAILGMDELSDEDKLVVSRARRIQRFLSQPFHVAETFTGTAGEYVKLEDTIKGFKGILAGEYDHLSESDFYMVGNIDSAVAKYEKRKESK

SEQ ID NO: 275 - protein, 468 aa, Lawsonia intracellularis
MAEILSVQELTYKIKYAVETLLPYVWVKGEVTNYSCPTSGHIYFSLKDNESYLHCVWFNSMQRETETFDPLTGEVFQNGPRLSLAKTITNGQKIICAGTIGVYPPKGGYQLLVDFAQSEGVGEWYSALEKRKNELQQQGYFDLSRKQIIPHNPKKIVVITSPAGAAIQDFLRIAKERGTEKYIRIYPVTVQGEESIHQIAQAIHTENNSNWAEVIVLIRGGGASQDLMVFNDQQLIDAIYTSKIPILAGIGHESDISFAELTADLRAATPSHAAQLLWSERTQLKQQVHDMEIALTKAAHFQLQKIQYVFNKLNTTLQWLSPLKKLERNELQLNSIYEKLNAIFNYKLKLKNLDLIQYTQLPSYSIVKKISYYKEQLSFLQRKLYRYIHSILLTKKQNTNNNKQLLINNFFQKYQQLLYNYEKLHVTLKMLNPHLLLKRGYALIYLPNGQILHSIQEAPEQQYLHKTS

SEQ ID NO: 276 - protein, 690 aa, Lawsonia intracellularis
VATMTYTIHNLHCRGCAIRIEEQIQSLPGISFASIDELTHHLVIEGSAPDLIELNKIAGEILPGVYFEPYSTNAIDEEVSWPPSLWIASLFFIIGILFQEKLYKFSLSVVTDAIFFGIPYVLCGWSVLLQGLKCVLRKDFFNEFTLMGGATLIAIALGDFSEAVGVMFFYRIGEYIQERTLIKSKKSIRALLATKPSIAHLVQKNHIQDVSPESLQPGANLLVRPGEKIPLDGIVESGTSQVDTSPLTGESVPTVVHVGSQVFGGTINIMGSLIIKATATYKDSSISRMLELVENAVARKAPTERFITRFARYYTPLVVLSAILVAILPPLFGLGTLQEWIYRGLILIVISCPCALLISIPLGYLGGIGAASRQGILVKGGSVFDALQKIKIVAFDKTGTLTKARFEVTGILLNKGVSREYLLQSAAMAVTYSSHPIVRPILDIVNQKPQVSGIALKEIPGKGIVATYKETSLVVGNETLLREHGFEPIIVDRPGSIIHVARDANYLGVIVVTDTLKSDAVEAIRCLKKYVNKVVMLTGDRPDSAEGIAKIIQVDEYRAGLLPEDKVAVIESFGPIEQTLFVGDGINDAPVLAYSGVGVAMGKLGAESAIEVADAVILDDSPVRVVDLIRIARKTYIIVLQNIILALGIKTVIMGFGIAGLSTLWEAVFADVGVALLAVFNSTRAGKLKN

SEQ ID NO: 277 - protein, 337 aa, Lawsonia intracellularis
VLVSLMSMVLSFFVLTVTFYTVVGGFRAVVTTDALQGIVMAISSILILCVVIYNGGGIENCILTLKNIDPGLITPTGPDGLLSPTLMFSFWILIGFGVLGLPQTAQKCMGYKNSYSMHKAMIIGTVVIGFMLLNIHLAGVFGRVIIPDLSIGDFVMPSLIVKLLPEFWAGLFIAGPLAAIMSTVDTMLLLASAVIVKDVYIHYKWKGDISSVSQKHIKQISTGCTLLLGLLVFVLALDPPMLLVWINLFAFGGLEVVFLWPILFGIYWKKANATGAICAIITGMITFWSISIFNFSFGNVYSIVPSLLLSGIAFIIGSYQGQPTSKEILWLFWGEKE

SEQ ID NO: 278 - protein, 273 aa, Lawsonia intracellularis
VQVRMGLQPYVLPGFVAGSTILDADGAGVTVSAVFNDYLGATAFWMRALHKNYDSNYGISKLPNFKGTTLDVVGLTIPVTISDIKIAPWGMFAFAGKKSLLGESYGDIEDVRAGLLPAMPAGFGYSWGAGNPFGDVFPNKKRGNAWWVGLSAELAGSSPLHIAVDGAYGRADLGSLRNVVIGDFLLDKIDLKRQGWYAALLAEYKFEYVTPGVIGWYASGDKVDSRGASKRIPTLVGNWSATSFGYSGAYGIGKDSVFGNTIAGSWGVGFSYE

SEQ ID NO: 279 - protein, 520 aa, Lawsonia intracellularis
MSFILVLCTVSSLFVGGGTGIFLYKKVSKKYIGDAKELAIRIVEEARKEGQAQKKEILLQGQNEIFNQKKEFEFDFKQREKELSIKDKKLQVQSERLEERLERAAEKEHEILKVEKELSIKERNLLTLEEQLKSRIDEQEKQLQKISGLTVEEAKQSLFEEVKNRSRHESAKMMRLIEAEAVETANRKAKEIIANAIQRYAGDYVSEHTVTAVTLPSEDMKGRIIGREGRNIRALESATGVDFIIDDTPETVVLSAYSPMRRQVAKMALERLIQDGRIHPARIEEIVRKCEEDLAIQVREIGEQATFDIGVYGIHPELIRILGQLNYRTSYTQNVLRHSIEVASLCGMMAAELGVDIKKAKRAGLLHDIGKAVDHEVEGSHAIIGAELAKKFNETEEIVHAIEAHHEEKGKPETALAILVQASDCLSGARPGARLELLESYVKRLEHLENIAGEFEGVSKAYAIQAGREVRVMVDADSIGDDQTYLLCKDIAGRIEESLTYPGQIRVTVIREHRAVGYAK

SEQ ID NO: 280 - protein, 302 aa, Lawsonia intracellularis
MDQDACTHSAALILAAGKGTRMCSNKPKVLHTLLGEPLLFHVISALRPLFGSNIWVVIGHGSSLIQSICSDLSLNFIYQEKQLGTANAVSIALPVLQQSGIKRLMVINGDMPLITSDLLECIIKKSDKTDFVFATLKLPLPNDYGRILRREGKIYSIIEAKDIEPSLQHDTTVEVNAGLYYFSLEVVDKCLPMIKNENKSQEYYFTDIIELAVENGYLVDSIYFEEDWHFLGVNTPKDLSYVESIQQAFIIEKLLQSGVIIHSPESVRISPFATIEPGVEIYGPCENLRCFIYSLWIHYLFT

SEQ ID NO: 281 - protein, 329 aa, Lawsonia intracellularis
MGENKTHGILILPFILSILGILFCFWNLLAPSTVPCISSGCNLYQGGEFGGLTFWWFGILGFGLLAILAVIGRAKLGLFIAGVGLCIDIILFITMVMTLPCMACMFVGLLLALTFYFFRKRVFLAESDSEDVENNRSLILICWWFFFLLNIILVIKGAVPPWALPVGDTSSSSSVAIYFSPSCTACQKLIMNLAESEVQKSSWYPVAEKSSDIAVIAKLEQLLKSKKFTLAEAFSLSISTQPLTTLEKLSPNHVLLQLKLWINRSHVLKDGDGRMPLLEFRGTPAMLLSSIKTNHLPVVGKDDDMLSLEFDKVGICGEGDAPNSQSCTE

SEQ ID NO: 282 - protein, 817 aa, Lawsonia intracellularis
MHTLGDEHKQTLDDEYVELPLMPLREVVMFPHSIIPLFVGREASIKAIEHAVTNYDRKICLVVQREPEVEKPSLESLYPIGVVSRILQFLRLPDGTIKVLFEGLYRVHWEHLDSEKSIESFHKVMVKAVKESTASFLESEALVRATHEALEEYTKNNKKITQEALAAISGLRDPGRLADAIMPHLKVDYIEKQSVLEQLDPVARLEKVYELLSGEITVSTIERRIKSRVKTQMERNHREYYLSEQIKAIQKEMGRDDDPQAELADLEKKLFEKNMPEYAREKGLSELKKLKHMSPSAAEYAVVRNYVDWVYELPWNEVKETEIDISNARQILDRDHYGLEKPKQRILEYLAVQKLTGSCKGTILCLVGPPGVGKTSLARSVAKATEREYVRLSLGGVRDEAEIRGHRRTYVGAMPGKLITALKRVKYNNPLFCLDEIDKMSADFRGDPASALLEVLDPEQNSTFNDHYLDLDYDLSQIFFITTANSLQGIPAPLKDRMEIIELSSYLEVEKKHIVKDFLLPRQVIKHGLKPENIRISENALTEVIRSYTREAGVRNLEREIAALCRKVAIKLVEKNDMDKTISITRQNLGSLLGVKKYRINESEKTPKIGVVNGLAYTSVGGVLLNVESVIMPGKGNVSTTGKLGEVMIESARAALSYVRSRSDMFGLRPDFHSEVDIHIHFPEGATPKDGPSAGIAITTSLVSALLGIPVRHDVAMTGEVTLRGRVLPIGGLREKLLAASRAEVTTVIVPRENEKDLKEVPEEILKALHIQFVEHIDEVLPLALISESEDIFSEIHTDEPFTTSLRRHTVEITTAQ

SEQ ID NO: 283 - protein, 428 aa, Lawsonia intracellularis
MRVLVIGSGGREHALTWKLKKSEKVSEIFVAPGNGGTAKCATNIPIKEDNIQELVKFVKEYCIDLVIPGPELPLTLGISDAMKAIGVACFGPSRWCSQLEGSKAFAKQLMVQLGIPTANYGIFHHIDDARDFIKNTGTPVVIKVDGLASGKGVFVSHTEEDALKALEYIMDKKVFGESGATIVIEEFLEGEEVSLLAFCSGDVVLPLPSVQDHKAAFDGDVGPNTGGMGVYSPAPCLPKDMLEEMANLTILPIVKEMSKQGHPYVGILYAGLMMTKDGPKVLEYNIRFGDPECQVLMMRLENDLITLIESCLTGSLSGINLKIHSSSALGVVIVADGYPDTYPKGMLIEGIEKVKEQKGIEVFHSGTQLDNGQFYSNGGRILCVTSFSSTLLKAQQDVYQALKMIHIEKTRYRTDIGLKGLRYKNETC

SEQ ID NO: 284 - protein, 525 aa, Lawsonia intracellularis
MRVTHQSMYSGMISQMNKSLSDYMETNIQGGTMKRINRPSDDPAGTARILSYRGSIGGIEQFKTNTDTAMGWLSLADETLNQVSTVVTKIKELAEQAATDTYTPDQREAIGFQLRQLMGTLINLSNNQFEGKHIFSGQDYNKSSFLEGLTVTSGDPNVNPNPPMQVTGTLEKTGLIRFEKDETIPPAADLNYQWSTDGGKTWQTATIPAGGREITIGGAVVTVPAPATTNVTAFDPDKPLGDTNGSLLYVRPTAIYQGSDNNSKPIVDRYGTVPMPPLNTNTVGTFSDNVVVKFPNGVDLSTPGSFDFSYSTDGGKTWTAGNSEVIVSPGPPSTSTARLILPGGYMDIGSADTTSPNNTIPPDGQLILRPQRTDLSFEIMEGQNITVTNVGKDIFGGIYSTNGSSNLEPMFGQNDGRNLFETVGNLIAYTETNNQEGIANALKDLELAQKNILTQAARIGGKENRLEITKEALDTNKYDQTQRLSGVEDADLTELVSRLAQQQMAYSTILKSSSMIMQLNLTKYI

SEQ ID NO: 285 - protein, 413 aa, Lawsonia intracellularis
  misc_feature (401)..(401): Xaa can be any naturally occurring amino acid
  misc_feature (405)..(407): Xaa can be any naturally occurring amino acid
  misc_feature (410)..(413): Xaa can be any naturally occurring amino acid
MFLPLPTPHEMSLWDKESINIGVPETVLMENSSREALHVLKKTFGSIENKYILILMGSGKNGGDAVCLARHLHDAKANVLVLHTRSFIHYKGTTRQYLKLAKHCGILFSLAESWITKYNKTPWGEPDIIIDGLIGTGLSSNLQQLELELVNTVNKLSKKSFILALDIPSGLSGLTGKPQPTAITADITVTFEAAKPGLILPEASNYVGVLHICSIGIPLCVRKKNPPSYQMINQKSKLPLPKPQPMWYKGNAGHLLIIGGSSNSEGILTGAPCLTALAALRTGAGLVTIAAPYKLCNEIKANYPDIMMLPLGTPETYEWGPDLIEQILSKLHKYNCIVIGPGIGRTIGTTQFIAKLLSTPSRIPKVIDADAIIALADETTILKNLNHTDILTPHPGEAATXLKTXXXSVXXXX

SEQ ID NO: 286 - protein, 339 aa, Lawsonia intracellularis
MEISVIIPVYKSQDIARCLDSFLSQTYKNFEIICVGDNVKDECHNVIKEYVNRYPEQIQFVLQKGRGQGGARNLGISLSKGNYIMFCDADDYVEQNILQIMLSSLIKFDADFICCGFDRISVSGHIFSKEMMKFSQTIFQVTPQNINTLAYIFPAPWGKIFKRSIIGDSRFPENPISAYEDCIFFLSLAPKIKRYVILPQILYHYVTHEHSAVTNASIKKTITFRNDLINLKKDFEQAGILPIYEPLLTLAAFIHVGIADVHRIAETTIPLKQFISEVKQFLDTSFSGWRNISYRQGKKITIRSLGVYCLKWLYIFNSFNMFISIYNGLIKRLRIDIKW

SEQ ID NO: 287 - protein, 374 aa, Lawsonia intracellularis
MIMMLDPIVRSLNYISEQSQGHGRIIMLSASGKPFTQKFAHELAKEKTLTIICGRYEGIDYRLSELFPIESIRVGEAVINGGEAAAMMLIEATSRLLPGFIGKETSYTEESFSNNLLEYPQYTRPELYESISVPKVLLEGNHQKIKQWQRKQSLKVTFNTCPEMLNKANLSTSDMEFFCNNIKELARLNLGRNLHCVLLHYPVMLGDQTIGATSLTNLDVHDIARCAKTYGLGSVTIVTPLQDQQNILEKIITHWTVGAGGKSNPDRAEAFKLVNIASDLQSSLDTIENYTGQSPLLIGTTACKYGVLLPCDVKEMLLQQPIALLFGTGHGLTPDTLNSCFGVLRPLRWIDNYNHLPVRSAVAITLDRILGDFY

SEQ ID NO: 288 - protein, 560 aa, Lawsonia intracellularis
  misc_feature (474)..(475): Xaa can be any naturally occurring amino acid
  misc_feature (483)..(484): Xaa can be any naturally occurring amino acid
MSSEAEKIIYSMIHVSKRHGQREVLKDISLSYFYGAKIGVLGLNGSGKSSLLKILAGVDQSFEGETVLSPGYTIGYLEQEPLIDETRTVREVVEEGVQELVNLIKEFESINAKFAEPMEPEEMDALIEKQGKVQELMDAKGAWDLDSKLEMAMDALRCPPGDTPVSVLSGGERRRVALCRLLLQLPDILLLDEPTNHLDAESVAWLEHFLQTFPGTVIAVTHDRYFLDNVAGWILELDRGKGIPWKGNYSSWLEQKEKRLAKEAKAEKERIKTLARELEWIRMSPKGRQSKSKARIHAYEAMLNHESEKRAPDLEIYIPPGPRLGKTVIEARGTTKSFGDRLLIEDAHFIIPSGAIVGIIGPNGAGKTTLFKMIAGLEKPDTGEFLIGDTVVLSYVDQNRESLLPGKTVYDIISGGQEVIRLGNRDINARAYCSRFNFIGSDQQKSVDVLSGGERNRVHLANMLKSGANVILLXXPTNDLDVXXMRALEDGLENFAGCVLVISHDRWFLDRLATHILAFEGDSKVSFFEGNYSDYEEDKKKRLGKAMEQPHRIKFRKLTR

SEQ ID NO: 289 - protein, 345 aa, Lawsonia intracellularis
MYICFATVILSWRKMMSSIETLERNLAFDLVRVTEAAAISAARWLGRGDKNAGDKAAVDAMRLSFNNLPMIGTIIIGEGEKDEAPMLYNSEQVGLGYGYPLDIAVDPVEGTNLLAFGRPNAIAVVGAAPAGSMYDPGPSFYMQKLVVSQSAKNVIDLDAPVETNLKNIAKALGKDIKDLTVFVLDKPRHKQLITDIRTAGARIQLHTDGDVAGALLAVDPRSEIDLMIGTGGTPEGVLSACAIKGIGGGMIARLDPQTETEKQSLYNAGIDLSKLLEVDDLVKADDVFFAATGISGGSFLHGVQFHGQGATTHSIAIRSKTGTVRHIQSSHNWEKLMKISSIGYN

SEQ ID NO: 290 - protein, 434 aa, Lawsonia intracellularis
  misc_feature (133)..(133): Xaa can be any naturally occurring amino acid
MRAEQYLKTCLECTIKKLGYTWPKKAVIEIPQNTLHGDLATNIALVLANNIGINPKNIAEKIAEKLQQESTSFSSVSVAGPGFLNITFSPTFWQKTINHILSKGSSYGSCQLGNKQKVLIEYVSANPTGPLHXGHGRGAAIGDTLARLLRFTGYNVTTEYYINDAGRQMQLLGLSIWLRIKELSGIQVTWPEEYYKGTYIIEIAKALLEEQPDIISYTDIDGEQASFHFGMNVILNGIKQDLKTFKVEHEEWFSERTLIKTNAIEQTLKALECTGLTFEKEGALWFQSTVFGDDKDRVLRKSDKSLTYFALDIAYHYTKYNRGFDRIIDILGADHHGYIARIKAAMQAFGHDPMTFDIILIQLVSLLENGIQVAMSTRAGQFEKLIDVINEVGVDAARFMFLLRKSDAHLDFDLELVKQRTMNTIIGKYVFTGP

SEQ ID NO: 291 - protein, 366 aa, Lawsonia intracellularis
  misc_feature (144)..(144): Xaa can be any naturally occurring amino acid
MAKNQLDDFAATLTAQLKDAAEQMRNMRTPPEHPQNEQIDSTTTKKNRSIPKKHKNTIQLVTDTKQLTKKVSNKKEQTQQTSQKQPAKPKDGQIAPTQKEPSINVSISISPEEQSTNSIDQTVLYSHQLSSIDTTDSSQLLQSXNNQQKYSNNLLADPESVDIPSTKLSTTVIDQSSDSHQQTLVDNNNLMAANDSPLSVLPSESLQYTQPSKSMLFETDILQENISHQDIPSPEDNHINTSFIGTPTTSTQPLIDNDSLKQTMTACDTKKQSQSIPWGHFSSDALSTVQINTATIGGARQIVLDALTQLKQEFSHVTINLKRLATVLGLSYGTVRNTISRLVREGVIYTTQIRTGDAHGVYIEIC

SEQ ID NO: 292 - protein, 1139 aa, Lawsonia intracellularis
MKNLISQYIMNLSDTFQQLIRNICIYKAQTFNTILHTVYDKKIHKIFRIPKHIKLTKTLLQQTIAILLLPFFCLFCGSSELLAMNNGNGKSPKPLCLKLGPDGGTHHSGGSSGGSSPITSQPQSSGFGSSSPSVSSGSSSVEVTRGLSSPQECCPPCDKNSLDACLKGACIGAGLGIGAGMIPFGAMTSCACPATGSVGAGTCLGGSVAGAALGTACSLCKTHGCQQDSPYVTCDKDMVKVTGLGISAGGLLGAGVGLVTSAATGAPCPDMAAACGIGAGIGAAIGGPLSSCLYATSAMCCQSSSRITSNISEHQSSRLAQHHLTSSTSHLPITTQPQSFSGQATDPHMTNEDIDRGTCPSPCCTMTDYTVRVCTYPDPCDHFAGWATFGSCLGTLFGSLGAYLLGADVSTTASFVSSGSLCTCGLLGMGYYCKKYGNQHLREDGHTTREINDTEECKTCCKSICEKMALGAAVGTGAGCIAGTCAGGIMSHWDLSKMIESAAAGAGSGCCTGSLCGFLWWFLGELERDGFLDCCLKKHGIKSKKEGQPITEQPQRQPQVSSEFSTEDKQCIKEVCCGATSSGLCNCCIGGASSAMAHGCGSSAAVTAITSGATGCATGAACALLTHCLKKHHPKKWAKIQQAMHSLVTCVAAPVTSQPQPREENDNDDERPGPSSGGHGLGFGPEDYPLLSANQQNNSDTDSDDDNDDKRQQNSGSSSQHDGGSNDGPSDDEQSKKSKGKGKGKGKGKGQKNGEQQQQPTALTRGPLGGMGGRHGYKCYDTFIPGYNRAGQISSLQSMQSILLGSSEQVLYSLRLLALKAYTNTSYEDDSLQLMTRFTSKRHILSGPHQKNTQNTLTSAFKSYAMFGFIDNYTANLERKCRGGRIGIITNLMPNVRLGLAYNRNKEVAKEHIGMRFGTASGSVKAQTTTDSLSAVISWNTDKFGFTGHLASCYGWGKVKTNRYFTHGDSEVGAKGKPDISLGGGLFQLGYNLPITKRFSFTPYIEYMISTVSWSSYSEKTGPLPCKISQNKEYVMEQSIGLRNQWKVTTNSQLQSWVSAISGKRTLEGIHSKPLIAQIDRYKASIPTYKKRYVRTELGLSYEANIIDTINIGINTSVRLEKTKRFEGQQINTYIQYTY

SEQ ID NO: 293 - protein, 379 aa, Lawsonia intracellularis
MNRTLVSLMAEVPVDSIEDEQGLIHVFPLGSFTARDGPPGTLGVPATSWQLTLSGAQEVIRRWETRKTPLVIDYEHQTYETKGNGQPAPAAGWITRLLLRENGMFAGVEWTSRAKEYIRAGEYKYISPTFLFDATTGEVLELCSAALTNMPALDGMEPVKAKTHTTIQLPKKKYSHTGSNPLQEKGGALHLAMEFCEKGETDLFKENVSSLEASATAFLEEIKKTQGQQKRSKKNRSVSTKSNIQQEASSDRFSELMGLYHEAQKEVVSLKERIKEYECKEESLKLEQCIEKALSDGRLQHSCEAWARACAVSYPEVLRAFLEASTSMAALVSMQTRQGSHISQSGYGQSALLSTEEEHVRSQLGMSVETFIKHKKECQ

SEQ ID NO: 294 - protein, 450 aa, Lawsonia intracellularis
VLYGSSQATASDQEQEVTHQESPGEVGPQEDSQQQQQQQVQQTPGNQAQTSQSGETQPQAEGGDSHDYSTEGARPKLRGKDTSRGGPGGKATFIPGYSLEGHISSLYGMQAILLDVSEQVAFTLKGLALKVQNNAMVKDDVLQLNDSSASIKKKKQIGMQALQQESAFQELMPYQVIGFTDTKDTNLECKLGSSQVGLLVTPKDGLSVGLAYNRYKDTGKEYQGISFSAGSGSAKSKAELDGLSMLVAWNPRGQGFTGHVVGYYGWGELKNERSFTHDGAQVTSKGTPGISLSGGLIQLGYTIPITKQVSFTPYVECMVSNVTWNGYKENSGPLPCEVSSNREKVFEKSIGLRSRWDVTERSCIQSWVAGVSSYRSTNKVHVKPLIAAYDSKYEASIPSHGRQSTKAELGMSYKSKVTRNVEIGLQGKAQLDKSNKRPQHQVNVHFQYMF

SEQ ID NO: 295 - protein, 789 aa, Lawsonia intracellularis
VLFNKFMIYIYITICYSYTLTVLFLFQKKLLKTYYIFVAGVFIFLCTAKHDHAIAMDRLSGIPQRDQVETDSSSSEGEEEEQGATGIDMGFYNTLDSIEFAAEVTGRNHSEECNYRYENRRYRKKKEREEEIQEEKKRCEMIEKQCREVTHYQNVKQKVESFIAYPSLVAEQKCWMDTYKEEALDRLNNVSQERHEKERSIEEKQQQILRSQEINQRLIAEGQSESFFNIFEQSESRILRPVFRTRFQLRVRREELNAYFNRMMDFLYGSDAFLQEIIDEEEEAECLEREERVALDALEQLRVELEHNLVQQHQEMQRRIPDNILNHREELILQELTWSYTEVLSNAFIAYDTHCQTLSAQQSRPPFFPYLEEAMRQKRSKAEIVASVDMALLSLDDSREDSESSERGEIHDVSWFGGNALLDETLGEVEEIEHSESSKSDVSQKSTACTEGESEEASSTQQSEQSISLEQRYLLQGARPRQPSKGGASDSSLSFIPGFSFGGQISSLQSMQYILCDVSEKVSTELKSLVQHARQQQYDKDNECCLTNLISRKRYSSVPQYDTVQHTYNISSPYRVFGGVDSYSKNLEHKIRSVIIRVKQVLLGVSNKLEVYAVKRSLRARWFKKELILTTFYLLCLLCGKSKVFASDRESSDRQHVKQVKQPLHHSKHKSHQPSGKEIQKKVEKIEEAKKLLEDLRSQQVSTHETKEGLNASFQTVKQAQTVLGILESELKEMLGKYFSSVSSSERDEDLSSHTISKQKGKTDPHKIKKKILQRQELSLRSVLQDIRK

SEQ ID NO: 296 - protein, 371 aa, Lawsonia intracellularis
MAPAPGFGANNIQGQGDSRQLLEKVKDFLNLLVYQDKDKKPTQPQSGYNVIANQGSVKGLSYVIHGAIQEVQNSMRVLALNMNTARLTSEKPFRIFGSLSGQASSQRNSGASTQAGVMYAIPMFPKLWVGTAISQGRERKKEYQGVDIAKAYGGAKAKTETNQASVIAAWNVAEPGLMGYVEGTFGWGETKNTRVFTHAGERITTKGAAHTSTNGGIARVGYNIEITPMMMLTPYAEVSIATARWDSYKESGRILPAKISATREHVIEHRAGLKVDWHISDVCKIQAWGAAILGERNNTGVTAKPISLYSVSISSGKDKSRYKQLEVGSNIDFKITHNCGVGVNVGIRTKDGEKDKSIKPQCMGIHFWYDF

SEQ ID NO: 297 - protein, 330 aa, Lawsonia intracellularis
MKVIVTGGAGYIGSHTCKELARQGYNPIVYDNLSTGHKSLVQWGEFEYGDILDLSRLQSVFHKHKPDGVIHFAAKSIVSESVSNPGYYFRNNVTGTLNLLETIYNSKVKYIVVSGTCAVYGQPEQMPIHEDMPKLPVTTYGVSKLVMESMLKSFEAAYGLSWVSLRYFNAAGCDLDGETGEWHEPETHLIPLILKTITSNTPLTIFGDNYPTEDGTCVRDYIHVCDLARAHVLALNYLAKGETSEAINLGTGSGFSVRQIIDSVERITGRSVPYRLGQRREGDPPCLISSNQKAASLLGWRPQYSNIDQIIASAWNWHSNFCNTTFYNNR

SEQ ID NO: 298 - protein, 446 aa, Lawsonia intracellularis
MHMCSMSELNLQGKQIVLREDLNVPLKDGVITSDKRIRAALPSIKFALERGAGVVILSHLGRPEEGKPTKEASLAPVAARLSELLGMDVPLITDYLNGVTVSPGKCVLCENVRFLVGEKKNSEELARKLAALGEIYIMDAFATAHRAQASTEGAIRFAKHACVGPLMAAELKAIRHILHRPNHPLVAIIGGSKVSTKLQLIENLSRKVDRLIVGGGIANTFLKAAGFEIGLSLYEPELVSTAAKIMRETHRHVSPFDHLGGKLMANAYKQGFPFETLGAKVIEQVSQHMSPFDSLGETTRKEDSRGISSIPLPSDVVVATELSEKATAIIRKVDDIKPDEKIFDIGPETAQRIAEYIMNAGTVVWNGPVGVFEIDQFGLGTKIIAHAVAETKAYTVVGGGDSIAALEKYGYLDKVDYVSTAGGAFLEMLEGKILPAVAALEASASS

SEQ ID NO: 299 - protein, 435 aa, Lawsonia intracellularis
VKNELLFAKQVLKGTNQKRMNISKARLNYSRGGKICKLDKVRNKQQQPLFQPIISDLTPFTKQLLEILPYILDKTLHLSHSQRIALPDDIHNLSCLLTSERKGLYKSYWSNARFCSAYLWYFFPWNLIRLTSLISNLALPEPKSEVVIMDLGSGPLTLPVALWLSKPTWRNCKIKLICVDTAIQPMNIGLKLFKQIAAQLKESFVWDVTLIRGNYTQVLKSISSPLHLIMSGNMLNELKGKTNHLIRSRMEQMVMLINNVLHSDGAALFVEPGTRLGGKLMSTLREVAIQDTFISIAPCTHTAFCPLFNSTNNLWCHVLFDVDAPQWLLNLSQAANLSKVKVSFSFQLLRYRKNTLKLLDNTTSFLTGRVLSGGFPVLGMGTAQYVCTKKGLALMSYTRGIPSGARVLCKPLPGNQRDIRSGALKVEWVSTLEKE

SEQ ID NO: 300 - protein, 481 aa, Lawsonia intracellularis
MLLLVVWRIIMKKVVTRFAPSPTGQLHIGGARTALFSWLLARHFDGIFHLRIEDTDLERSKQEYTDTILESMSWLGLNWDGEIVYQSKRNERYHEVIDILLQTGHAYWCHCSIEQIEKMREEARQKGEKPRYNGCCREKKLSANPSGVVRLKVPSAGQVTFNDLVKGQVTVQNTELDDMVLQRSDGTPTYQLAVVVDDHDMQVTHIIRGDDHVSNTPKQILIYNALGWEIPIFGHIPMILGSDRQKLSKRHGARAVIEYQEDGFLPEAMLNYLVRLGWSYGDQEIFTLQELISFFDGTNLHSAPAAFNIEKLLWLNAHYLRRLPVSQIANLMLPFVRKEGFTHITKERIEAVLPLYVERADTLKELVYLMKPVLISASDLTYKEDDIKKIVTNESKEHLDRLRNLLEAEINFEPLYIEQLIHEYITSNNLKFKEIGPILRLAVSGVLGGPSLQELIVVIGKKEVLARLVIYKSVFGNSIYV

SEQ ID NO: 301 - protein, 711 aa, Lawsonia intracellularis
MFDTSTLNSAQLEAVTAPDGPVLVIAGAGSGKTRTIIYRLAWLAEQGIPPSSMLLLTFTRKASQEMLHRATMLLNYSLGDVNGGTFHSIAFSTLRQYKPSWATGKVTIIDAQDTLTSLQHCKEELKIAKGDRSFPKLQTVAALLSRARNKEITFKELIQKDSPHLISHIDSLTTLVERYTTYKKQQNLLDYDDLLFEFELLLKGDESKNIPPLAPLFQERYQYIMVDEYQDTNRVQARLVRLLSGNTNNTMAVGDDAQSIYAFRGATVNNILEFPNLFPGTKIIRLEENYRSTQPILDTANAILKESQEGFHKHLFTNRIGGEKVRLIRSLSDLTQANLIANRIKELLSIYPPKEIAILFRAGYQSYHLEIALAKHTIRFRKYGGLKYTEAAHIKDMMAFIRLIVNPLDMPSFLRIAAFSKGVGPKTAQKIYQIAAQGNFLELQKVCNKYPDLLSDMTLLDEIRQQPLEPTEILTKVFEHYQPKLIVHFPEDWPRRQQGLEELIHIASAYTDLEQFIADLSLETPEEELNEEESIVLSTIHSAKGLEWDAVIILDLVEDRFPSRHSLIRSEDFEEERRLMYVACTRAKKQLELSVPTTLYNKQYGCNEPAIPSPFVQQLPSIVIEEWQEGYSGNIYKKITIPTNQPDSKTCSQIPASNNTYNKEELSYSFCRHKIFGRGKIIEYLLPDKCRVNFPGFGLKVILKDYLTIED

SEQ ID NO: 302 - protein, 465 aa, Lawsonia intracellularis
  misc_feature (351)..(351): Xaa can be any naturally occurring amino acid
MINPRKTYSLKSVIIAVATAQFIMPYMLAGVGPLLPVIGMHFNATAVELSLINAVYALSLTIFHLIAGRISDILGLRRVFLIGLGLFTCTSGILPFSPNITFFFILRFIQAIGAALMNTSGLSILTNCSPKDRLGQTLGIASIGIYLGLSLSPCLAGIMAKFFGWSYLFYLMIPIGLIAWLLMKYTVKEEWYIDAEYPFDWTGSILYAISISTLSIGMIWILNGIWPIVFLSIGIIFFGSFLKVELTEDHPILDIKFLIHNHAFLYSIFALLINYSSIFGLAFYFSLYLQLGYGLSVLTTGLILSLQPFVQVIISPIAGRLADAFGAIKIAIVGMIMCGVGLFLAIILEIXSNIFEIAYIQMILGLGAGLFASPNMTAIMSAVDSKHMSQAAGLIGTMRTFGLLLSMLIISITMNIYFGGEILTAKSMDKFTAAMDMNFWIFSLLNIVAIIFSIMTLKVKRKISI

SEQ ID NO: 303 - protein, 338 aa, Lawsonia intracellularis
MTNSLLLDCGSGGRASQRLITGLFLKYFDNDILRTLNDAAIVSLSSPVAISTDSYTITPLFFPGGNIGSLAIHGTINDVSMLGAKPLYITCAFILEEGLELDILERIVASMAEAAHTASIKVITGDTKVVPRGCCDKIFINTTGIGEVLVDPAPSGSRAEPGDVIIVSGSIGDHGLTVFGQREGIDFLSQVESDSAPLNVMVEQLIQEVRDIHVLRDPTRGGLATTLNEIASQSSVVCYIEESLMPIHDVVRSGCDILGLDPLYLANEGKLLCILPSEKEELALDVMRSFPQGSEARKIGFVSDAGKTTRPGQVILHTVIGGYRLLNMLEGDQLPRIC

SEQ ID NO: 304 - protein, 831 aa, Lawsonia intracellularis
  misc_feature (801)..(801): Xaa can be any naturally occurring amino acid
MFSFFIRKIFGSKNDRYLKSLSPILDQINALESTMKALSDKEIPVQLATFKQQLQEGKRTIDELLPEVFALVRETSFRVLGMRHFDVQLIGGISLHRGKIAEMKTGEGKTLMATLPVVLNALEGKGVHVVTVNDYLAQRDAEWMGALYSALGLTTGVLTSGLSDDARKEAYAADITYGTNNEFGFDFLRDNMKFYPNQLVQRGHFFAIIDEVDSILIDEARTPLIISGGSEQSTTMYTQIDKIIRNLKPQQDFSIDEKGKVVILSDEGAVQVEKALGIDNMYDPSNIAIQHHVLQALKAHYIFRRDVDYIVKDDQVVIVDEFTGRLMPGRRFSDGLHQALEAKEMVTVAAENQTLASITFQNYFRMYNKLAGMTGTADTEAVEFAQIYGLEVVVIPSNKPMIRKDHSDVIYRTRKEKFDAIVKAIIELHKKGQPVLVGTISIETSELISSMLRKKNISHNVLNAKHHAQEAEIIAQAGQVGKVTIATNMAGRGTDIVLGDSVVELGGLHILGTERHESRRIDNQLRGRAGRQGDPGSSRFYLSLEDDLMRLFGSDKLSGLMQRLGMEEGEPIENIMVSRAIESAQKRVEGHHFEIRKSLLDYDNVMNQQRTVIYTLRHNIMNDPEPMDIILEYLDELLSDIYIELEDNDNNELNKSIHTQLYDIMNLSQVMSIDNTLPTKEQAKTLILSMFEKLKSKAGEAYNDLLRYVLLEELDRCWKDHLRNMDFLREGIGLRGYGQRDPKLEYKKEGFVLFQELLANIREGVFRTFTRLHLEKKEDNFFQHEPINDLWYPASHEKETXFQVKKTDRVGRNDLCPCGSGKKYKKCCGVH

SEQ ID NO: 305 - protein, 514 aa, Lawsonia intracellularis
MQSSLKIQFFLFLIGINVLSRTIIAMAAPTNPVAITLYPTGGWIQVVEELPVQDDKVYFELPAGAQLGSLLLSIEGQFIGSIETTPIASIDSPVVAKIRERYTKAVQEVALIRGKLAAVKAKIALWSNPECPSRSIEEIKKFDSMMGSKIEELYVAESTIEPALKKALYELELLEKAIVDAGGKNTYATAITAVIRPDKTNKKPNKQVIVQYGYMLSDCGWNPIYRFDALPEKGIVQVVQEAEIRQASGQDWRNADITLASVNIGSALVPPNLPDWKILPAPIQTYRQGQEVSPIADNAMYLAKSSVPIVHAQEEPTFTTWSLGKVTVPAGMVMRFMLYKNDWDAKFFRLLRPSVQPHSYLVANIDIPSSVDLIPGSAQFMVDGKVVGNGYFTLRSEENHIYFGVDPRVTAQMILDKSQSGRDGFLDKKQSHSWSWNIKVCNDHTVPVKVVVEEPEPQSGDIGIIITTQSNPKPIIEDHMYLWKMTLPAEGEIDIQHSVLMTAPGDMRIIEGRR

SEQ ID NO: 306 - protein, 478 aa, Lawsonia intracellularis
MNASRSPIILLPEALQNQIAAGEVVERPASIIKELVENSLDAKATDIEVIMENGGHTFIQVRDNGFGIPPAELRLALTRHATNKIKDLGDIWKIHSFGFRGEALPSIASVSSFKIESAYTKESNNTEAAFLQIKHGKIEKEGPSSLYKGTIITVQDLFATVPARLKFLKSPVTEQKRAQEIFSRLALTTNTTMTLFSGARELLKFPAAHSLHQRLKIIWPEELTSNLIPVDKTTHDIRIHGLTSPPTQTQLRSDRVLLYVNGRTLNDKLILRAIFEAYKGRLISKEYPQAVLFIEISPELIDVNVHPAKTEVRFRDEKSIFSAISTALKEAINKTIPSFSLQQTDTDIHPKGFWGEADQEYIFPIKKNSNIHPTQTEVCTTQSTTTDSHGFSLQHMLQNTFVLEPDCQQSLSAKESTYTLASSYSSHPSDNSSLLPNLTSNSTDSNKENEISIKYIDKQNVYWALSLLRTNRGYLSYS

SEQ ID NO: 307 - protein, 540 aa, Lawsonia intracellularis
MLMQNGPELKQLRTHIGYNTVQLGPKGRNVVIEKSFGSPVITKDGVSVAKEIELEDKFENMGAQMVKEVASKTSDIAGDGTTTATVLAQAIYREGVKLVAAGRNPMAIKRGIDKAVVAVTKELSDITKPTRDQKEIAQVGTISANSDTTIGNIIAEAMAKVGKEGVITVEEAKGLETTLDVVEGMKFDRGYLSPYFVTNPEKMVCELDNPYILCNEKKITSMKDMLPILEQVAKVNRPLLIIAEDVEGEALATLVVNKLRGALQVVAVKAPGFGERRKAMLEDIAILTGGEAIFEDRGIKLENVSLSSLGTAKRVVIDKENTTIVDGAGKSEDIKARVKQIRAQIEETSSDYDREKLQERLAKLVGGVAVIHVGAATETEMKEKKDRVEDALNATRAAVEEGIVPGGGTAFVRSIKVLDDIKPADDDELAGLNIIRRSLEEPLRQIAANAGYEGSIVVEKVREAKDGFGFNAASGEYEDLIKAGVIDPKKVTRIALQNAASVASLLLTTECAIAEKPEPKKDMPMPGGGMGGMGGMDGMY

SEQ ID NO: 308 - protein, 511 aa, Lawsonia intracellularis
MKLFLGDVIMMGSLFIGATGMKTHSTGLGTVSNNIANANTIGYKQQQVVFQDLFSQDLAIGSTGSQGPNQAGMGAQVGSVRTIFTQGAFEPGNSVTDLAIGGKGFFQVTLEDKVHYTRAGNFRFTQDGFLNDPSGFTLMGSRISNNPNIKKETLEPIQLDFNDPTVAKSPAKTSTALNAVVNLGDSTDKTQSEANPYFALLESWKGNGTPPISTSNYSYAQPMRVYDQQGNSHDITVYFDGAPSSTGSKTFEYLVAMNPSEDGSAASGTDSAGLLMSGTMTFSSNGELKNMTAFTPTGSATKDLNAWQPAPLVNGLPQFSANFVGAGIQPLTLDFGIKSQQNMWAGAPASAAAIGTDIGKLPSMMPIQTSSGNSTARNGSSSTRRYSQDGYPQGDLVDVTITSEGKLQGKYSNSQVVDFYNIPLARFTSEDGLRREGNNHYSATLDSGGPEFGLPGTSNYGKLSVNQLETSNVDMSREMVNMIIIQRGFQMNSKSVTTADTMLQKALELKR

SEQ ID NO: 309 - protein, 398 aa, Lawsonia intracellularis
MKQVISFDMKKFFLNIVIFCFGIILLSIIGLIGLYFWVSRDLPNITKLNDYRPALVTTVLARDGTLIGYIYREKRFLIPLSEMSPFLPKAFLAAEDAEFYEHEGVNPLAIIRAFLINLQSGTTRQGGSTITQQVIKRLLLSPERSYERKIKEAILAYRLEKYLSKDEILTIYLNQTFLGAHSYGVEAAARTYFAKHAKDLSLAECALLAGLPQAPSRYNPYKDPEAAKIRQRYALRRLHDVGWITQAEYEEALQEPLYFSSMKEGLGAESSWYMEEVRKQLVSFLSKENISQYGIVLPLYGEDALYELGFTIQTAMDPQAQLVAYDVLRNGLENFSKRQGWKGPIEHISSTMIQHYLENATFTPEKLDGGAWAKAIVSKVSQEGAEVFLSSIYKGLLV

SEQ ID NO: 310 - protein, 474 aa, Lawsonia intracellularis
MFCKLKVIICITLMFIITVVPTIAESALPNFVPLVKDASKAVVNISTEKKIPRGRTEFPMEMFRGLPPGFERFFEQFEPKGPDSQIHKQRSLGTGFIISSDGYIVTNNHVIEGADSVRVNLEGTSGKEESLPAEVIGRDEETDLALLKVKSKDSLPYLIFGNSDTMEVGEWVLAIGNPFGLGHTVTAGILSAKGRDIHAGPFDNFLQTDASINPGNSGGPLINMSGQVVGINTAIMASGQGIGFAIPSSMADRIIEQLKTNKKVSRGWIGVTIQDVDTNTAKALGLSQAKGALVGSVVPGDPADKAGLKVGDIVTQADGKQIDSASSLLKAIATKPPFSVVKLKVWRDGKSKDISITLGERKTTSSQKQSSPESLPGALGLSVRPLTQEESKSFDVKLGIGLLVVSVEPNKPASEAGIREQDIILSANLKPLQSADDLANIICGDAKKKGVIMLQLQRNGQTFFKTLSLTEDSN

SEQ ID NO: 311 - protein, 325 aa, Lawsonia intracellularis
MLIHCPQCHFYRELNTSQIPDNAVMATCPKCQTRFRFRNLDSEYVDPSSSNTIHLLQQAESKTFTNPPTNNTSISHSDTECLKNSSSEYNQQNNYKNVLEKLKKYTLTNQTRQPTDGYVDLIPWEHPEKFDFFSSFYQTIVRVMFNPATFFGNISNATSSLLRPLFFYILVRLFQTLMDGMWFMVSFQALEPSITESSLHDLLSSIAQEMTIPMTLIMTPVTLALQLGIYVLLFYLMIRFIQPEQTYFHTIFRVIAYSAAPTIVCIIPIIGSLVGSIWFSISCFIGCKYALKLSWTKTALALIPLYLIAMAIGLQGAKQFIHIAG

SEQ ID NO: 312 - protein, 575 aa, Lawsonia intracellularis
  misc_feature (470)..(470): Xaa can be any naturally occurring amino acid
MRWSQCYIPTLKEAPGDAELLSHKLLIRAGMIRKLTSGIYTWLPLGLKTLNKAISIIRSEMNRIGAEEILMPMVQPADLWKESGRWDQYGKELLRIKDRHDREYCLGPTHEEVVTHLLRGEVRSYRQLPINVYQIQTKFRDEIRPRFGLMRAREFLMKDAYSFDQDNEGADISYHTMFDAYKAIFTCMALDFRAVEADSGSIGGNFSHEFMVIADSGEDTIAFCRKCDWAANIEHAATLPPQTKALTLEKSMEEVVTPGQHTIKAVSTFLTIPEQQIIKTILYTIDNKPVAVLVRGDREVNEVKVKNMLDATVITMATPEQVHQWTGAPVGFAGPVGFTAGPIIADHELMVYNDWVVGANKPDKHILHVDLARDVQNITFADIRLITDADGCPSCGREIALTKGIEVGHVFKLGTEYSKSMNAFFLDENGEEQLMVMGCYGIGVSRVIAACIEQNNDKYGIIFPPPLAPXEIMLINLDPRDESVVMKASEIYQFFLSEGIEVFLDDREERPGIKFNDADLLGFPIQVIIGAKSLANGIIEVKNRKTGEKSSFSLERFFTDFYSWRDTVYVTWGLS

SEQ ID NO: 313 - protein, 348 aa, Lawsonia intracellularis
MNLKVLSLFSGCGGLDLGVEGGFLVHKECIHATSDTPWICLPKNRFNVIFANDIMAQSNVVWSSNFTGTFQLKSIADLLNENFQFPKANLVIGGFPCQDFSVAGKREGLKTQRGSLYHCMTEVIQQVSPEAFIAENVYGLFYIPGVREKITSDFEQIGYTVFSFLLFSNEYGVPQIRRRVFFIGLKTEALKRKVSINEIIPPKTHQKFVSVGTIFKDLQEPEYTLDKEQQIYSKSKFYGSQWEGNREVDLSLPSPTLRASGPEFRRLSKEHGGKHLDELKDGKIERRLTVREYARIQTFPDDFILMFNKNNEEIISMTSAYRLIGNAVPPLLAYHVSKRLDELWFDIF

SEQ ID NO: 314 - protein, 380 aa, Lawsonia intracellularis
MDRGSLMDFLQTFVSQWNNALAVVVVLGALIFFHELGHFMMARILGIGVKTFSLGFGPKIFTIGKRKTKYSLSLIPLGGYVSLAGEEDEDENKKIEQSSQITDELFLPTEKFSNRPPWHRLLVVLAGPVANILLAFFIYWGVSWVQGSTFLLPIIGTITENSPAEHAGLLPGDIITRVDGMPVSQWDQVAEYIAESQGNEVTITLSRDDKLLEFRLTPEEKSRTNLFGEKKPAWLIGISAQGDIETRPLSFLAASVTGLKKTWFSISFTCESLLKLFQKVVPLDSIGGPILIAQLVGQQANAGIIPLLLLTALISINLGVLNLLPIPILDGGHVVFLLLEMIFQRPISPFIKTVSMRIGIVLLLSLMVFATWNDIMRLVS

SEQ ID NO: 315 - protein, 537 aa, Lawsonia intracellularis
MPPLEGEEGDIWRDEYVSQEQRSQFFLQQQQQQSSSLSEVSQTGVVGSSRGLPTIQEEDEDGSSCSSIEGYLSSPTPSVLIAEEGSGSDLEESVKSPSEHPSGVDSDMLEEGEVIGEEVQGPLTTKRPAPSSSSDSSDDESLSPVVKRLKQSSSSPPKSPGSPSSRGDMSSMLIPGYNHESQYGSLKGLQCVLFGAVEQMSANLKTLVLKTSLYQAETKDKKTSSLIAKESKKACMSLCGKERSVKKVMSDSSNLLSFLNTCHFFGYTDSYLANQENKVSSGKVGLLMNPISNVSIGLTYNRHKNHGKEYHGAQLGTSFGSAKANMELDGFSAVVAWNSEEKGLTGYLSGCHNWGQMKNTRQVMQAGKEMRTKGSPDVQLSGVLGQLGYTFPLSKKVSCVPYIEATHIVVKWNQYREDSGSLPCVISGYTEKFQEKTIGLRTSMKITDKAILQTWVAGGTVQHTTSNITSMPLASPLLLYKTSVPGNKKKSFYSECGTLYEMNVTDFCKVDLHGSLRFKKDQKLDAGQMRLHFQYLF

SEQ ID NO: 316 - protein, 313 aa, Lawsonia intracellularis
MFQKITVCICLLLTVTVLVLGWHKAYARIGGGRSFGGKSFMNRPYSKPIPSSPMMRQQSNISQQIQQGSVANTASRGFGGLGGIFGGLLAGTLIGSLLSGHGFSGGGFLDLILIAGLVYLAYRLFFKRKITSNEASVTNSLYATQQPLTSEMPIPRSTTLSGTGWESLKSQHTTYSADVSNQAITTNIPIDFNEEEFLKGAKAAYVRLNAAWDNRDLEDIQQFTTPGFLNELQQQITENPNPETTEIMLVNASVVDVKKIEDEELVSVYCNVLLKENQSQESPIEVREIWHFVRPASGEGSWKLDGIQQVEHA

SEQ ID NO: 317 - protein, 424 aa, Lawsonia intracellularis
VLLDLKLLQKKPEIVSTALIHRGSPLNITSFEELDTKRRELLSEVETLKAKRNQASIQVAQMKRNGENTNTIIAELSELSSKIVVLDNMINQVKNELYDWMLAVPNIPHYSVPIGKDETDNKEIYRWGEIPIFDFQPKEHWELGSTLQGLDFERASKITGSRFTILWKWAARLERSLINFFLDFHLAQGRTEVLPPLIVNEKSMTNTGQLPKFADDLFKLEGTDYFLIPTAEVPLTNIHSDEIIDEYLLPLSYCAQTACFRSEAGSAGKDTKGLIRQHQFTKVEMVYFSHPDQSYDLLEQMRKSAETLLEQLELPYRTVVLCTGDLGFSSSKTYDIEVWLPGQNTYKEISSCSNCESFQARRANIRFRASSGEKTQFVHTLNGSGLPIGRTIVAILENGQQKDGSVKLPKKLVPYMGGIECIEP

SEQ ID NO: 318 - protein, 359 aa, Lawsonia intracellularis
MNEVSVGIEDGDSIACQKQWGYFSIITYILLFFLIFSPSITIAKEPILEVTYTIPYHAHLVTEPVIQIAEAATKLHALEQTRSNFTSNLAVKLELRTREQQLALASAIYFVSIHERTVLDGPKLSIKAHVYPSSEKILDDHIRQLLRQQDHLQLRLLAVNQLEQYINEGVELLNQAHLCSSADIRCKHDDSLVPKIKRTSNRIKALELFLVELNDFEHVWANPEKSVLTFSEATALDPDNSLLWLGVGECLVLLNRPYESIKAFQKVMIKNNIPARTLYMRGIAHLQMYLPGLAIKDISQALQLEPEHPSWWRALGTAKLVAGDTVAMCADFYQACAMGDCEGLAEVREQNFCLVSPEF

SEQ ID NO: 319 - protein, 301 aa, Lawsonia intracellularis
MKVYLIGAGPGDPGLLTVKGKEILQQADVIMYDFLVNEILLNYAKPDAEIIYVGKKGNSSYTSPQDEITQLLITKAKEGKIIARLKGGDPYIFGRGAEEAEALVLAGIPFEEIPGITSTIAAPAYAGIPLTHRDYTSSVTFITGHEDPDKIDSAHNWSALAHSANTLVFVMGMKNLPEISKNLIQAGLSPDTPAALIFWGTTAKHKSLASTVKNLPEEAKKNGFTNPSIIVIGKVVTFHSTLNWFEQKPLLGKSIVVTRAREQASSLARLLTELGAEVISSVYCPEVIRRVQIFSFILFKT

SEQ ID NO: 320 - protein, 302 aa, Lawsonia intracellularis
MPAFPTIFGGPIVSGIERSSRIPTQKNTTNRPCGIPRILLGIATLGISELVTAVQNFRTAKQLSSPDVQRNIIRLYNYNVVDSMTNPYQESTFPGAMHEALALACSDLRKYGFKPDVQKHLSHSLKTLKMNTPQMKEKLTYELMVMYLSQEIKYHCLEEIVSSLIQSKLSSINPVTGCLESVDEQLIKYIIESRGKQTLYKLAALPSPNKRSEKMKLGDSVVQVTENLGNQLQNMLNSTYVLNRIKEKICTLLITSGQYTEEITSAPNSVSSLAKELACSLARVTTILFPNNGFCSNQFNVL

SEQ ID NO: 321 - protein, 338 aa, Lawsonia intracellularis
MGGYMRGVTSRISNSSSTQHIVETHFKETNTDSSSQFGQTKMNSSGTRRIILAALTLGISEAVRAISSYCTKSSEHQGAQVAEKESPRLRAREGTPLNEAARRHNYGVIHSTIDPKQDSPFPEAIQNAMVSAQEYLKPIVTPGHEDILTRSLTTLQMRLHEIPEPFTSQSFELELTKEIKLTILKNSFSDSLIQELQQRKVPPQPEFISQLRTIETPVLTNISNMPKEEIPEAMNKLILKSAATIHNAHNSKQAREESLSIYQHVITSRYNISEQEAKKDNGYKMLETRLMECSTELQDAEKAKHPEYPVVPLRTYQEAFIEVTAPFLAIFGVTETKF

SEQ ID NO: 322 - protein, 323 aa, Lawsonia intracellularis
MQITILSGKETNPGDNPWTPLEALGKLTVYDLTKPEQTVERAKDADILLVGRDILTTEHIEELPKLKCIGVLGTGYNQIDIETAGKRGIPVINVTAYGVDAVAQHAFALLLELCRHTAALDQAIRNGAWSSPDWAPWKYPQVELTYKCFGIIGYGNIGQKAGYIAHGFDMSVLAYDERPVQPPSYTPFSFADLDEVFKNADVLSLHCPLTEDNFHLVNKKRIETMKDGAIIINVARGALLDEQAVADALISGKLGGLGSDAFVDEPINLNNPLLSAPNTVFTPHIAWESVEARRNIVRILAENLKAWMDGKPQSVVNTEYLVK

SEQ ID NO: 323 - protein, 319 aa, Lawsonia intracellularis
MSHQVSKTLIGAFVAGSILLLIIAIIFFGSVKLFNSTATFVMFFDKSISGLSPGSPVVFMGVPVGRVIDIKVDKISNDIGFTIPVYVELYENTHTIFIKHNLPQEEEEETEYLNNLIKQGLRASLAQQSLLTGQLMIELNFITPESQMDTTHVVFYKGTPVIPTVPSKLDNILKELTSLPLDKISGNILEITNSLKILLNTPETPNIIPQLSNFLHQGLAAVAEFNQSLIDIRKASKKYGTMVEGLNTELSLTLKEATKSFQTINNTTERLLGNNSPTLLDIHHMLQEVSKAAKAIRILANMLERNPEVLIRGKGINQK

SEQ ID NO: 324 - protein, 388 aa, Lawsonia intracellularis
VNMLQNTTHLPGKDDLPPSANITLFRQTLEISFSGNWQLNQPIPDATRFASQLNYPVVKELYLKTNSLGIWDSSLIAFIKTLINKAQSQQITINDHELPAGIKNLIQLAFQTPPNKEAHKKTTQISFLEYIGDITLSLPSTIQKILTFLGEMTLSTKRLITGHSDCSSTNIWRCMQQAGVEALPIVSLISLLVGLILAFVGVIQLRMFGAEIYVSSLVAIGMTRIMGAVMTGVILSGRTGASYAATIGTMNVNEEIDALMTFGIRPSDFLVMPRLIALTTMTPLLVVYSDFMGMLGGFIVGVGVLGIEPLEYINFTQKGFALKNLWVGIIHGIAFGIIIAITGCYQGLNSGKNASAVGLATTSAVVYSIVGIVIATACLTIIFNIFNI

SEQ ID NO: 325 - protein, 473 aa, Lawsonia intracellularis
MNRIYNFTCRRSGVKSMKKDLQKSTKHECTKAGCRNTMVTIEQLYNKDICVMVVGLGYVGLPLLMQLAHHFPAIGFDISKRRIHELLRKYDRTGEISSEVLDNTKASFSYNQTDIHQADIIIIAVPTPIDTYRNPDFTPLIKATQMVARHMRQGCVVVYESTVYPGATEEICIPLLEEVSGLSYLTDFTVGYSPERINPGDTIHTLENIVKVVSGSDKATTDLLTALYGTFIQAGIHKTSSLKVAEAAKVIENTQRDLNIALMNELAIIFDKLDIDTLEVLEAAGTKWNFLPFRPGLVGGHCIGVDPYYLTRKAEEVGYHPQVILAGRRINDEMGKYIAETCVKLLIKKNVLINKARVGILGLTFKEDVSDLRNTKVIDIVNELEEFGVTPLVHDPLVDAEDALKEYQIVIEEFSVFKQLDALILAVPHKIYLHLQPQELLSCFKNINSAVLMDIKGRLNPSDFTEDVLFWRL

SEQ ID NO: 326 - protein, 353 aa, Lawsonia intracellularis
  misc_feature (38)..(38): Xaa can be any naturally occurring amino acid
MVSYIRLLGSIFLVLAIFGCGAQFNKPSLLDETPIDYXSVLSDYIVELEKEPLQYILLKKEKFSQMEIYNYQFTSQHWSPDNFVSPAIWEHQVDIYIPHHPVSERALLIINNGINNGTFFTSPKAPTDFTPEVLEEIARSTKTVVIALSDIPNQYLTYRGDWRFLKEDESIAMSWSSFLQDPESRYTRPLYVPMVAAVSQAMTLAEKELQALKIKHFIVSGVSKRGWTTWLSAIADSRVDAITPFVIDALNTRKVLGHMYKTYGNNWPIAFYPYYRFDLDKQLDTVPFFNLMNIVDPYRYLGTPYKSRLAIPKYIVNASGDDFYVPDNSSFYYDDLPGEKALRLHQTQIIMGY

SEQ ID NO: 327 - protein, 2446 aa, Lawsonia intracellularis
MIVKNLNPVVLQVEVMDQEMIVILKKIKDSKRDGSSDSKKKKKKHSHKRFCRKRLAHERNKLRRKHQEEKELYKEQFTRGVQQVFALQDKERAEVAKKGGDLEALAERHMQDEEEHYVRNRREVADLHDKQNKERCRLYLISKGGGESANTTVTSDESSVSEILESGSEAAVYKEPVTQEVEELRRQQRKELAVLMFCCEDEKTALQTMHEKNKESLVGTILLETLEKVHKQEEDDLAAEHQKKKEELLKKHKQEQKDLENKHKRSSSKRGPKRKLHPKVKAVLLEHKQAKNRQKIIHQNRKTHLEKKQEEEKRMISQGQVPSVLLKKVSEYHGGQEGTSLVELVALYHEGEMSALLDEQKRQREEREKRQRQDLIRAKVGAFFTQRTPSVRKKEGLSLSQSSLHDSSPQKYTHPSHKTCGRLAAEQAIEKGFFENHKANCSFILGIEQKKELKQLEEECEKELKQLEEECDAAYAIFLQQLPFLCDEDRQTQEQHFVSQRQQIEKYREQQKEQLTCLQHKHQQEAKELEKLLEVQAKELEKRQKEERQKQRDVVSSYPERKAQQERLITQSKHLTALKEALSEEDSIFQKDLTSSTIVKQQLSKVEQQKELEALQEDFVLDLCFTESDYTSVSEESSEESSVPEGISRKPHGPSGGGFRHPRREISSSDSDTEGKSDDQSVRRIEQEIQTEQTGPQGTEESQTYAVQQKTSQFVEVKEEEIQVLEEKVQIVEERGDSDKEKVLTREEKKRKKEEVQRKHEKELNLWMSQYETTVQKIEQKYKEKKANRHILGCTLEELQEQEEKESKVAVGNFTVLLEKMREKQQKELQQFPSSDEDESDVDRRKKKKVIKTKAERNAQREQRKHHHTPHPYHPEESTSHLVLDTKQIVTLTPSSSDQETPVQSKETATNETPIPSLPSTVKGLTLEEVTVTVLPQPTQLSSLLSYFSSEPLQEQPCQVEEQQVSFESSQVQASTDEATIDPEVQLVLDEYSSKVACLQQEMDKKLQEIEEKGTDSSASSDTEWSWPKKDMPREIKTLKGSDSEGKDQQEVPKIPSAGAHSLSSMAESEDVGAVSHIEKKKRKRHKKHKRSQREKISRAKRALMAQYFAKVTLLGQECSEKVSEIQEQKKQKCEIEEKQRKEREEFFDQHQAARNALLAKQQQELIGVAPEEVGPLQDKHRQEQQAQSRQWGLNLHSLIKQQRKERGLSSSISSSSSDEDIIDEGSQSDDQEDSKSLSSPISPPPSPPVSGADSQCIGGASSSDTDATMKSDGHKSPEVPVSSDKKEETGGNQSSKVTTYLLSVFTGKGGTAAGAQSSSSEHTGSKRQQPSGSDQTSKSSRQGPSTPFEGQGTSGVEGASGGAGDPGDGEDKKSKKLDDSHGKDQKSSLKKHKDKKKHTTEEEEAKKRLQEKVEQKRKNRELLKQKCKEEEEAFLRNREKCKKQFLQEQEEEYEAARQSGKDLELLLVEQRERQVEFYNHHESQHAKMKKKHEALLKGKRKKKVKKYGTSLEEQQAKERAEARQKYQKGIEVMEKRQQEELDEASAQGKNLEDIKKKHRQEEEDFYREQMLGELGNLLQRQNQERQSVGLPPIEGSSSSGVTTYSDTEYSSLEMDLETKEEVYTSGNESTEQEVVTEQEVVVTEAEEVTEEKLLVKDESFSYQGSLTEYLSQAIPEEVNKPCIDDTSSSTSTTGRKSSFFEKFFSKVKGRKHSQEETESKSGTGSTASYGSKSSTTMQKDEVQQHSDRKLKHKQKKKRKKEKQLEEKHQQQQQDVYKDFKKRRLLMETRHQKELEEAISKGEDITKLQEKHHEEASVQHPLLFSQAMSVLREQQKVERENLIVSSGDSDTTSDTSDLEETGVSSKDHSPEKKGGKDGKPDPDGGSTSSSQYQGLVYYVTADSAPVFPYGSEASLPFSSDKGKNEGKQQTLQCGDSGYESDNQESGDGSGGSSTENQVCVSQESNSSLGGGPHSDDGYESSDENKNGKGSSGPQSVCCVNGVGATGAANGGGSSVASGVGSGNTGSSGSSSSSSGVSGNVGTPGNGGSSAGSPGGSSGSPGGSGGNVGGSGNSAPGGNGLVSVTSSMGNGSNPPDPNDPLTMSLLADDEDTLSDEAKEELLVPLDYNENAIMGSLDGLQQVLHTPAKSVQSAMSSLALQSRTGHMSPTKRFQAFASIEGEVSSQSGNQNAYTSQFGIVIHPVPNIRVGLAYNYSRDHTGDLYGIRSKKDIGFAKSKVSTHILSSMLVWNAEDSGFTAHIGISYGLGQVKNTRYISYLDDVIHTKGRSDTSILGGIAQLGYTLRLPKFLLTPYIELSTVNAWWKAYGEEYGLLASDISRGEERIWEKSMGLRTRWSITDDIQWRVWSKVISGQRKSKELTATLKAPFVPWETSTPDKKKTYSQLELGTAFDIQLSKQFGIGVNGSIRFSKKKEMRQQNAGMRFWYNF

SEQ ID NO: 328 - protein, 1269 aa, Lawsonia intracellularis
  misc_feature (526)..(526): Xaa can be any naturally occurring amino acid
  misc_feature (937)..(937): Xaa can be any naturally occurring amino acid
MEMLDQEELLIVEASGGDVEAKVKELQAQAEIFFKIQKDQYKLLFHRQEQEMKALEASFYGDEVDAPTGARSIEEFLVDRMLKPQLSEDSEEELKPLEDPSTFYNPSKYGEGSFIFFTQLSSEQTRDQYGSDDENGFRYHTVIVQGEGEPKGDEAPPPFPFYSFVSGDSGEMQSGDTGGAGPPSEELSLGNTSSSSDDDIITSSIESSSSSSSGDEADVSSFETSLDEGSDCVDGVYGAVGGEEPEKKKGKAVDDVDGGRKKEEDSYTDKEKKKKKKSKKERKLESELEKLKKEQAKARSEFEVKVTFCKEELFKSQRDEFVTAENKKQDLKALEKKHEDENAQFTSMCEEQFQILCKNQEEEKVRKEQELQKAKEDHKKKKEKKKEKKEKKKEKEISKLQQQHIKAREQFLQSYKNCKEKMEMLDQEELLIVEASGGDVEAKVKELQAQAEIFFKIQKDQYKLLFHRQEQEMKALEASFYGDEVDAPSGARSIDEVLSSEDSEEEPKPLEDPSTFYNPFKYGEGXFIFFTQSSSEQTRDQYGSDDENGFRYHTVIVQGEGEPKGDEAPPPPVKLRVPPSLTADLEDVGDGNTEVDSRCFNQGVTSSGISSSRSSFTTEEGSQGSGSMSSLVRLQVSSSLITDLEDTENGNTKTGTQQWLGNTGNDNSCNESTQYTDNSSHHSSDDDGTDGHSNDNINGAEGGSGAAGGSGGAEGGSGGSDDDNNPPDDNSSNEEEEEESILLVSETDLTDTKAEDGDSEGEGGIKDQRKKRKHKKVSKRKQRQHERQLLEKKSLAHSQWNEKKKQQEKQRNRALLFSIQRKEDLSEQIRKEEREQQEFESNQHHERILLEAKHKRQNAEHSTDSDGEVHFPSKRPKKSHKKKSQQVGKQSSQVEQQVEKKDSKKQREEKDVPSCLLTDISYKRLLSSSQQEEKIHXVTSQQKEKEELQKKQEKEKEEYKKEAAKVQKCLAKLSSQQQPGASRQQKQEEEEILQQQTKEGNQYILKSKVKLNNKQLAEKDKLIRKHQEENLKLSKKHRKEKTEKEKKRKKKEEIKKKKHTITPEEKELQEYCSGRRRTLYSMQIDERDLLEEKHKRELGQILDMEEVEVLEEQHEEEVKELFEKQSKDRGLLEEQIKILLQQQSSHTTSGDEKKECVESSDEFDSIPSSSTYYDSTSSSYSTGDFYSSMPSGEPEVEIGIEIDENFGVGTSENSNNTQDETHRPIGGARKYQPKEYKDVSDTSKKQKKLTRSTPKLMLLSKKGKRSIES

SEQ ID NO: 329 - protein, 1469 aa, Lawsonia intracellularis
  misc_feature (14)..(14): Xaa can be any naturally occurring amino acid
MRQTEKKFFHLLFXGPPTQFDDNNAPPPFPYDPPQDSPQNGEDSSEINPNPEGSSQQESPSESSTEDTSSSSEDEDIVTLLSGNIKQARPIGQSTITTTTTLVTSVEGAEGLFPIEEETEQNLEDVQGSGATQGMVGLSTIEEEVEEAPGASEDLDSNQGATGEVSSPGSKEEVVYLSSSGERAIHKWLESSISMPVTMEEGSLSQGGGKTSTLYSLMVSSGILSFGGDGNGEKASSSNKQSKRSPEECKAFEEKQVQQRHNLLQSIEEKKKELLLTFEKQCPPGLPSYKKDKLVKEQKVTMEDFLCVSCYQYETLEQKQNEQRRRWEEGEDVAEEEDLILLWDTLDNEAEEGTKEEHAEVKVEGVEGEVFDGISEEDKPKKDDKEEQEQKATLGDSSGETIEESQQPQQEEEEKKENSPSGSNESPSPQQEEESVDETSSVVTSSPLLSINEVKQTEDKSAKKKRSEKELDDFNRKQAEQKDCFLGQVQQAKNELEEKYGEACCSASLDELLELEKKFIKQNQKLDSTSEAQFKKLERRQEDERNRWEEGEDVSSDEEICFIWSSDESYEKSDRLHEKHTQELADFWRNYKKKLSTLKEIQQERRDQSSEDSKEKQAMEEMFLAEQEAMYKSQMNTFAELKQQQKKEEELEELGWTLENMQGAVGGVEPEDEDKIESPLDRKHQQERKSFWEKCRVDSKFIEQEQSERRDRWRKQGKPIASLEEIFIEEQQAVFETKMLFWESLQERQKKEREEKERREEQKRIAELEKQLSPFWKAFKDDQARMRENHDMRRKEWEESGKSLVVLEQLLAEEEEIFFQDKMQMLEELERKKYFEEKQSSRQKERQGRFSTKDDSDEDEDDIRYHTVFVQGEGEPPGNEAPPPLPFPPPVLGDSGEMQSGDTGGAGPPSEELSLGNILSSSDEDDNIIVSSTESSSSSSSSSSDESDVSSFETSSDEGPDCVDGVYGAVGGEEPEKKKGNGYHKKKFKKVKKKLHNVALNQKLKKLKDKLQQLEKEYHKSIADCQNRYQDVKCNLLMAQAEELIGKSREEQDTLCKKNSEKIKKIEDGYRRQYEQLTESYYTKKQVVLNKLSAVMEKKALLKQKIQEYDSVDGKHRVSKGYKKKASKLKKESKKLEKELEALKEQQTKELQDFDQKSDACRQQILFFQKEEVNSIKDAGGDLCALQNKHTEEDCKVEELFTSQKELLIKEHESQRNEKEKRKKELEKQQQATREKDTPTCYEHGIDNIVKLLEEEIESLEKELEELEEKQEEEWKAFELQTEACRKQVLFLQKAKPKDSAREGGEEDRRAFESMVASQQELLLKEQERQRTEKLIRLTEAKEKRKQHKKKQQQKQEEKEREKQKKKQEQVKREKERELERQKQQLKKEHVQDRKCFVTTFNFCKEQLQRLHQENLKVVHEKGSDDTSLMQEYEKEKECFLTAQKSQYEKLLHQQRQEMKTLIQGSHGS

SEQ ID NO: 330 - protein, 929 aa, Lawsonia intracellularis
MSLEKVKWLLHQKLMDVILSATDALSQMIYNLEKTSSEGDVETESIMNLIDAIMSGELNVTATIVQPTQDTESNTSESKTQLTTVLEAVDQPATPVPLEMIDVSPVNQVETKVEAIPSHEKKIENLSSHEWINSLELKESYALIAFGEGHLKDFIDEAVEITENLTTGLLDIEKDLGSDPEIINDLFRYFHNLKGNSGIIGFHELNSLTHEAETLLNRVRHGEMVATHELIDLLLLVVDVIDSLVERIESSTGIVQPFDISEILVCLQSAVAGKDITLPKALIGSLNTVDSLEQNSIEHGVETIENQVSQTSTESSSAFNSSDKENEIAFAVTVKQQQSTIHAALEALAQDSSQREYIDALYRSLISIQNAAGVMGYDELKVYAERTAGLVAQGRDSGIDFSLMLDILTQEVAIVDDMIAVILAGDGITQLSSSPIEQKEVLSSQDGNTTDTVSSTPVVSAEHLTSLKSSSLSTQESPGQIESHVPSKPGPVLKTISNVPKNIKPPSVKSSQAKPANANDATSEQKSSSTIRVDHEKLDHLMNLIGELIINRNRYTMLARRLEEQGTNADVVEVAQDLSETTYAMARISDELQDTIMKVRMVPVASVFSRFPRLVRDLSRKSGKEVDLVLEGEETELDKSVVEVIGDPLVHLIRNAVDHGIEPESERIAQGKSTKGKVTLRAYHKGNSVAIEIEDDGKGLDPDKLREVAIKKGILSAEEAKLLDDREAMELIFAPGFSSAEKITDISGRGVGMDVVRTNIKNLKGSISIFSEIGKGTRFTLSLPLTLAIIDALMVNVAGEVFAIPLDAVSETTKLEASKLNDINGRKAVTLRGEVLGLIELSELLNLPQEEHTDVLSVVIIHSNERRLGLVVNKLLERQEIVIKPLGSYLGDIPCISGATIMGDGGVILILDPHEIYLLSTSAAKSVSQ

SEQ ID NO: 331 - protein, 475 aa, Lawsonia intracellularis
MTILHKKVGGVLSSGTPCLPVSNRICNFDEVAIGYTDEQAKIEASRCLQCKRPRCKQACPAQVRIPEFIAALLSGDLKEAYRIIRTTNSLPAICGRVCPQDTQCEGSCVLKAKGNPVCIGRLERYVADSILNMEVGLYVGLNEYDAKPPVVTHCKVACIGSGPASLTAAGYLIAQGIGVTIFDPCYEHGGILTYGIPTFRLPNTVVSDEIKALRSMGVTFSTQGIGDTLTIQHLFDEGYKAIFIGIGAGLSCQLGIPGEDISGVFLATKYLKDIKVNQSDKERLLSVQNNYLGRSVTVFGAGNVAMDASRTAIRLGAEKVHIIYRRTKSEMPARDEEIAYAEEEGVNIMELVAPVAFHKDKNNKLCSVTLQRMTLGEPDASGRRCAIPIKGELFEYTTDLAIIAIGSKPNQRLLEKIQGLKLTHEGYILTDEVGETSIPNVFAGGDIVTGAQTVVLAMDAGRKAAQAISKRLLEK

SEQ ID NO: 332 - protein, 308 aa, Lawsonia intracellularis
MNETFTVYLAPHGFLQELIDEINTNIICSKGHLILVKGSPKKFAWAQNTWLSPRFIPISSITDGAKKLLSIQRNWWLHSENHHRRATLIQQQLPYVSAKKLHFGEIPPQTPLGSWTLWEKDIILASPDCSSVFPDGVITFHENKIEPPSRAYLKLWEVFTRFSFVPSYKELCIDLGASPGGWTWVLAKLGSSVISIDKAPLASHISSLPNVEHYTGSGFRFTPLHIGNVDWIFSDMACYPNKLYNFIQPWIINKNCHTIICTLKLQGKPSNSTLSCFKKIQSSYLIHLSYNKHELTWIYSTKYPLVML

SEQ ID NO: 333 - protein, 369 aa, Lawsonia intracellularis
  misc_feature (364)..(364): Xaa can be any naturally occurring amino acid
  misc_feature (369)..(369): Xaa can be any naturally occurring amino acid
MINDKIKVKDLAIELGVSTKDLLRVLRELEISAKSTISNISIEDLPKIRAQFNTPNTNKEEERRQIQPGVILRRKRQQPSTNQTDIKLNPVDTNVSESTIQTENLILENKNTLSPHIEETTEKIPATTNEILYNSQIAKIVQYPTPSVPNKTLTTTPHQTKKNHSEKDVLESHDSSNKNIKQSSSQNTEKTNRKPAASAIPEGSSAPSLLPPVSEQIRRLHDEETENSSSEEKNVDIQQKEIPSTQVRVISKPNITQSHSWDANNTRSSSGQRTETEKQSNTAPHTDSREHTGHNKRPVSYQGQNRNNFIATPDTIPNVEHDGQNKKKRHTSRRSTEFNHKFQYNNEDDDISRQNRGRKRHKQXQQHLX

SEQ ID NO: 334 - protein, 570 aa, Lawsonia intracellularis
MAHQMGLKANEIIKVLFNLGVMATINMSLDIDTATLVAAEFGYEVEKIGFTEEDYLVATAPEQSESLKRRPPVVTIMGHVDHGKTSLLDAIRKTNVTGGEAGGITQHIGAYHVTTKSGEIVFLDTPGHEAFTTMRARGAQVTDIVVLVVAADDGVMEQTREAVNHARAANVPIMVAVNKMDKPEANPDRVLRELSDIGLVPEDWGGDTIVTKVSAKSLDGIDELLELLALQTDILELKANPDKPARGHIVEAKLDKGRGPIATVLIQEGTLHQGDTFVCGVFSGRVRAMFNDQGKKVKDAGPSMPIEVQGFEGVPEAGEAFICLPDEKLARRIAESRAIKQREKELAKESRVTLETFLSKTSNEKEAQVLNLVVKSDVQGSLEAILEALRKLSTAKVRINIIHGGSGAITESDILLASASDAIVIGFNVRPTAKVKEVAEQENVDIRFYDIIYKLVEEIKSAMAGLLAPISREVYLGQADVREIFNVPKIGTIAGSHVSDGKVLRNAGVRLLREGVVVYTGGIASLRRFKEDVREVQKGYECGISLENFNDIKLGDVIESFETVEEAASL

SEQ ID NO: 335 - protein, 332 aa, Lawsonia intracellularis
MANYPPSAEEIASLIQRYDRIVVTSHINPDGDAIGACGVVSYILKALGKRFIIYNATGIPYHLEWVPLPTKVITKLMDIPFKPELFIILDCGDIWRLGRELSSCLLEYQSINIDHHIGNPNFGTLANWVEPKAAATGQLVAAIAEVIGIPLTGELAQCLYLSIVTDTGSFAYSNTSPGVLHLAAKLIELGLNPSPIREQLDNQWPLAKFHLWGKLMQKIQLEYDGQIAISAVTLKTITDFGATKEDLEGFTEQIRKIKGVRVAALVREDPGESCKVSLRSSGTDNVQAVAIQFGGGGHFNAAGATIHEPIETAVKQILEAIQKITFSTTDVD

SEQ ID NO: 336 - protein, 552 aa, Lawsonia intracellularis
MDGSGTEIQELTLGNVIRGGLVLTSELNLSQGTINNLITGNEYYDRSGLRTTVNVRGGTIGVLTSGGSDYSELNFIPGEISTILATNSIGNQDFASLSQVTIHQGAETLWGMRDEVFELQTNNLQLGGELFIPADGTGGVALITNHIIANSGVITPVNMSPERMTPIIGFLEPTGEVAQLTIYGPLTVNLSHSPEILGKIITQPIPIAVTNSDVFGTSKLFVEHNTKGLIWSDIIFNPQDKTWYLTNFRGSEDFYGLSAAREASNWLRQQHIWSLQRRSNKLLDHGVDGLWMNVQGGYEKLDAAIGDAKMPWIMASLGYDFMHKLSDFYNLKALYGFGFGFATGKNKWNTINSTTNDIYMGLVGAYVGLMHEATGLYGTVSGQFATNRTKTKCTGFDETYNWKENVPTEAIEIGWKWSIDEFKINPRGQVIFEQLSKHHFSLSQEGDTAILDKEFLTTTVIGISGEYDLDLRSKIIKLQASVDWIKGISGDFAAKSEVLNMKFKDKNDTSTFRGTLGASAQLLENFEVHLDIFGDLGNDKGIGGQVGATYRF

SEQ ID NO: 337 - protein, 347 aa, Lawsonia intracellularis
MIIKCDIDTIALPKNFLKEKKTTITLGNFDGVHLGHQALLKTIYLTAKKQQSISTVITFEPHPQAVLIGESPSLLTTKKEKLKLIKSMGIDLIFQLNFTSTLANMTTEQFVQSILLERLHMEGIVLGHDFSMGKERLGTQHVLSTLGKTMGFTVTHQPVFTFKEQPVSSSLIREAIQEGAIEKANLLLGRCYSIDGTIIHGKKRGRMLGFPTANLALSSNLIPSTGVYATLVTLESNQDNTFYIPVQHQKNTFLAVTNIGINPTFGDSIPKIETHLLNFHNDLYEQHMTINFLKKLREEAIFSNISSLITQIKDDISQTKTIFKNMLWPQSLSLEDPVDRMDATLKT

SEQ ID NO: 338 - protein, 496 aa, Lawsonia intracellularis
MGVLNRLYNMQLKRQGYTIKGRVQGVGFRPFVYCTATKLGLTGKVKNTIYGVWIEVQGDDSKLNIFKEMITNEKPSIAQFTSITMQSLGFQDKETEFLIEESSDGIQYTSLISPDIATCEYCVKELNTTTDHRYQYPFISCTLCGPRYTIIHKAPYDRHHTSMSSFPFCFTCEKEYNNSLDRRFHAQSNACPTCGPQLWLTDHDNRYITYNSEAILLAIEYIYKGKIIAMKGIGGFHLICDATNADVVNTLRYRKNRPDKPLAVMVPNINIARQIAYISEVEIQKMQSPECPIVILKAIPHSLPKNIAPDVSTIGLMLPYTPLHHILCNTLTKVAELERIIPALVMTSANVSGGTIIYNNDDALIRLNTITDFFLFHNRNIIVPVDDSVVCLREDNIGQSPNWHFIRRARGYAPLPITVKTLKDNTPCIIALGAEHKSTFCFTRGQDIFLSQHIGDLSEPETEWSFCQTVKHISQLFGFSPEVVVCDLHPDYFTTP

SEQ ID NO: 339 - protein, 320 aa, Lawsonia intracellularis
MAYLPYEYFCYFVYDIELSYEEIMSKEERLTFFVQQILNSFDAIHLDFTPVGDGLQVQCSFEDMNDRKYNELCEAWCKEKWYDQFTKAIKEIGIPWIDLFPIFKEKKATYKVYNKNYDTMHMNAYGVETCYQEIGKRLQFPELMPTSRNEFYTVSWDKIVISKFIKENVPVFQLLHTDRFQPIEIPGLVNFEANYWHKPRLNNNKPLSPLTVWLVTDSYFLLSGHQEREYPVFRGDIPLLAYHTKNLFTTHVQYFLSPFFQELLKKGPYPDILIETLVERNWTTMDRAKEDPFIRIAGDIYLHTPGYLLTPPLIDNYIYI

SEQ ID NO: 340 - protein, 418 aa, Lawsonia intracellularis
MDPSEDNRQVSVGGNIVDIKDTKAAGMLMSGTLSFDSSGKLANQSAYSLNGSRKPAVDPATGALINGNGFTIDRDGNAIPILNIDNPAENFYPAEVSNNGFPMIVANFTGVPGKNTAGSVGDATTFFTEIDFGLKATDLDNTWKNANEPLSSLSYKKTHNPMDVAGGWTVGGYKTPAPSVTELGMAQILENPAGVMPQYYFGNPNYDNTVPQSPPYVYKNEASYQAAYKTALTAAGGTAADIKKEHWPHNAASGILEANDPPNVKDLANMNGTPNRLSNAFTNYAGGSSTKSASQNGYGFGDLMNYSVNAEGVLFGVYSNGVQLPLYQVALYDFNSKQGLRREGGNLFSQTRESGDPSSGAANTSGFGSINANTLEGSNVDISTEFVSMIATQRGFQSNSKIVTTIDQMLETVVNMKR

SEQ ID NO: 341 - protein, 396 aa, Lawsonia intracellularis
MTNFGDISGSSARMSSLMTGTSGEEGLEELEGGVPKEQGGPGKGDASEAAKGQAAADSINSAGGTEKPGEVGDKEDVGEGGEIPEGGEIPEGGEEVPEEPPYVPPPLVEPAKISTVTDLSTLMGSLQLTEQKKNAEKTVNEIKAQNKEQQVKFQEQIKKIEDNIAESKKSGILKFFQKLFAVIGAVLGAIGGALAIAAGAASGNPLLVAAGIMAIVASIDAAMSSLSDGKVSISAGISKALEAMGVPAETAQWIAFGIQLAMIAVTIAIGFASGGGGAMAGVSKIADMFSKSQDVAKLAQMIEKASKIVQIAGSVNQSAIGGTGIGTAVVQSNIKANESEQKEIEAAIAKVKAKIETLQDFFKNQMEQFNAIMKIITDIIQDSVNTKIAVQRGARE

SEQ ID NO: 342 - protein, 341 aa, Lawsonia intracellularis
MPQYKLSEIAKLLNLTLQGDDIEVVGVNTLQDASPNEISFLANAKYIHQLVLSQAGAIILSKEYASRVPRALISTEPYRDFGRVLSLFSIPQGCFDGISHQAYIHPTAQVSKTATIYPFVFIGSHTVIEENTTLFPGVYIGEHCHIGKNCTIYPNTVLMANTSIGNDCIIHAGVVLGSDGFGFALTEEKQKIPQVGNVIIKDKVEIGANTTVDRGTLGTTTINENTKIDNLVQIGHGVTVGKNTVIVSQVGISGSTSIGDNCILAGQAGISGHLTIGNNVTIGPQSGIGKNIPDNQILGGSPAVDRQTFLKTSVLMPRFPELFKRIKKLEKILEKKKEHNI

SEQ ID NO: 343 - protein, 600 aa, Lawsonia intracellularis
MSNIICRQAIAILSNYIYWKKLLWIPILAYFIVITNNNIIQAAAPTSPGARYEEAKKALKNLQSDSINQKLRDPWLKISDLFFKIYTSFPDWINRPFALYYSAVALDELAKHSFTVSDAEKAIKCYQSVITKYPKRTITESALLNIAKVYAERLHKPNDAKKYLQKLLTDYPKSDKINEAQIYLKSLENLKEEPQKTSTTSTSKAKEAFHSTSKQKNSHLQKKTSEKTLAQLENIRWEVKKSYLKLIITLTEPITWDVISHPANPKTGNPIRLLIELHNTIPNPCIKPGICIKQNKLEKLRVDLSTPTVTKLLLDFSDLKTFKVETTHNPFQLIIYTSPTPDGIANGMKIGQTKHSHPKSTSPKPIVAHDLAQQLGLTVKTILIDAGHGGKDPGATHNGIIESELTLELSKKLGQILAAKGFTVHYTRQNNTWVALEARSRKATTVKADLMISIHINANKNTQIHGLETYYLGLARSKESTYIARIENSTSEKTLNDLDILLKDVMLTSKKHESRRLAESVHQNILTHLIQKNYNTHNGGIKSAPFHVLIGPKIPSILVEVGYCSNKAEAQRLASSNYQKALIEGLAKGIFCYLKKLQSP

SEQ ID NO: 344 - protein, 896 aa, Lawsonia intracellularis
  misc_feature (517)..(517): Xaa can be any naturally occurring amino acid
MTKRLNIFLLLLLCNILYCNIIANAASKDDPSIVVLPFQINGSSNDEELQTELPMLLATALKNKGFRVIPNKSALNLLYKQNISQLNISTAKKVAQQLHADYVVYGSFNQTGENFSIDSRLIDSTGVASARPLYIEKPKFNELNIAVTELAERISNGLIKKNTIADVRIHGLKVLDPDVILTRLTINKGDHTDHAKINAEIKKIWELGYFSDVSASIEESGEGRLLVFTVQEKPKITDVVVQGSKAVSIDNILAAMSSKKGSVISDRLLSQDIQKITDLYRKEGYYLAEVNYEIKEKENTSSATLLLTVNEGKKLYIKDVRIEGLETIKAKTLKKELALTERNFLSWFTGTGVLREEYLERDSIAISAYAMNHGYVDIQVASPEVTFNEKGIVITFRVKEGKRYKIGKIDFKGDLIETNEQLLKVTKIDDHKNYEQYFSLSVMQDDVKALTDFYSDYGYAFAEVDLETTKNEEDATIDVTFLIDKKQKVFLRRIIVEGNTRTRDNVILRELRLADGXLFNGQHLRRSNECLNRLGYFNQVDTDTLPTGKDDEVDLLVKVQEARTGAITGGVGYSTHSKFGVSGSISERNLWGKGYILSIEGFISSKSSSLDLSFTNPRVYDTDFGFSNNIYTLRDEWDDFRKKTYGDTIRLFHPIGEYSSIFVGYRIDQYRLYDIPSTAPRSYLDYQGKNISSVVSGGFTFDSTDSRERPSKGHIAKLIVEYGGGGLGGNDNFFKPIAELQGFYSISRSKNHIIHWRTRAGAAYKNSKKPVPVFDRFFIGGIDSIRGYDTEDLAPKDPRFGDEIGGDRMAFLNLEYIWTFQPELGLALVPFYDIGFQTDSVQTSNPFSKLKQSYGLELRWRSPMGDLRFAYGIPLNKNVSGKKTRGRFEFSMGQFF

SEQ ID NO: 345 - protein, 594 aa, Lawsonia intracellularis
MSYYRLIGTNLVYLLIILILFYPSPVVSQGSIELPPIEAFIAKWAPSGGSELGSSQSFLLELCDLLEISRPESPRATLVDNTYLFEMPVILTDKNGKITTGRIDLYKRGCFIWESKQGSYKSTSQNKGLHRRGTAIRGTHAWDAAMIAARIQAERYAYALPAKEGHPPFIIVADIGHTIQVYADFNDTGFYAPYPSARENTILLEDLRKPEIRERLRKIWTDPLSLNPSRENEKVTYQLVLTLSDLAQSLENEGHDPDVVALFIMRLIFTLFAEDCGLLPFNSYTQLLARLEKTPEQFASATTDVWKAMKTGGNSTALGKQVVCFHGHLFEDAEALPLNKEQLAIIYKAAKANWSGVETSIFGTLLERALSPKDRYKLGAHYTPTGNTSLAFTSLNAARELLGLPHNYISGIEVSIHDVYQANYITNQLQQELGHNFSVRSWMDMNANLFAALKLEKIGMFIILAMVVLIGSFSIVTTLIMLVMEKTRDIAILTSMGATSQMIRRIFILQGTIIGIVGTLLGYLLGITLALLLQKYQFIKLPPGVYTIDHLPVLLNWLDIFIIGTSAMLLCFFATLYPAHQAARLQPIEGLRYE

SEQ ID NO: 346 - protein, 339 aa, Lawsonia intracellularis
MQLLITGGCGFIGTNFIQLALKELKDVYIVNLDNLTYAGNPYNLKEIETTKPDQYLFIHGDIGNATLVQSLLQSYSFDAIINFAAESHVDRSITNALPFITTNILGTQILLDAARAMNVPKFIQISTDEVYGSLGINGKFSEKTPLSPNSPYSASKASADMLVHAAYKTYGINTIITRCSNNYGPYQFPEKLIPLMIHRALMDESLPIYGDGLQVRDWIHVEDHCRGILLVLEKGRPGNIYNFGGSAEQTNLAVVKEILHLLNKPNSLIHHVKDRPGHDRRYAMDFSKAAKELGYMPQITFNKGLAATVNWYLSHRDWVQNILSGDYKEFMNRWYKDRL

SEQ ID NO: 347 - protein, 322 aa, Lawsonia intracellularis
MYHFNKQLVLYYIVALCLYLLVNISIANARIIVVIYGGDTCITAQQACSIAIAEALLIESEEYLSHKFSEPRREAIKKYFSMVSPGLVLNTTELEPTSLEDGRIKGVFDVPIRKTALYRLLRELGLSYTTSFIQPYVLSMFNVPDEIALLDKLFLLEQVTGVVQSEKVDNTSHKIELQLSFEDGIWVAKLLGAAQPIQASGYSIDNIWREIWGAFFSQRQKETSSYLQSYLLRVSGWKHAVEVEALGKTLSHWESITKNVLLHEVSISKGVIAAQWTLTILNMDGFEKQIKQYSLARKLHYEIKPFEAIIKDNSIDIQCIGN

SEQ ID NO: 348 - protein, 554 aa, Lawsonia intracellularis
VAMILSLPSLPFCYISRSIKNIMEDKRIVLAIILSLVVFLGWHSFAEYMGWISPKVQHVANERHSSVDQTATSNIALDSVQSVFSPPTGKDVYIETPLYIAKIHSSGGILSSFILKKYKVNLDNTSPLVNLVSPEASQAMPLGITLNGQPSWSNGNWSFLGGDLYLKPGETKELTFVGIVNGVKIIRIFTFNADSYLIHEKLQLASEKQNSCPTKVGLLVAATPFGTGQYDPTRMAWSIKDSFKEETSIDTLKEKGIQESGEFNWGGVMSNYFMNVVALSDPLYLTIKGRIQNDVWRVALERSNVLIPAEGTTSITVNWWFGPKDRELLSRAPDKLENAIDFGMFSIIAKPLLTALTFFYEYTGNWGVAIIVLTLCIKIVFWPLSQKSYNSMEQMKKLQPMMQKLREKYANDRDTLNREIMQLYKTYKVNPAGGCLPILLQIPVFIGLYQALLNSIELRHATFIYYLPFTHLVWLADLSAADPFYITPLLMGASMFLQQKLTPASGDPTQQKIMMVMPIIFTVMFLNFPAGLVIYWLFNNLLSIGQQWWMLRKA

SEQ ID NO: 349 - protein, 325 aa, Lawsonia intracellularis
  misc_feature (2)..(3): Xaa can be any naturally occurring amino acid
  misc_feature (12)..(12): Xaa can be any naturally occurring amino acid
  misc_feature (16)..(17): Xaa can be any naturally occurring amino acid
MXXYVLHANFLXATRXXLEIELIQDAKNGIFGLVGARKALIRARLAQMQSSVDTLKQKKISSLSLSKKTKKQNRKINHHQIDQVGNVGEISTQQLKSSYNQSLNNTVVREEFPQVDNKIEREKDNEFSQLLDLSIENKGRLGPEVATLDVNEELFNDNYDGTTKNFSELDQDKLITEATNVVTKLIIPILGNVPIEVTILNNRLDVHVDCGEYSGLMIGRGGQTLASLQYLSSRILSRIMSSSIRIQFNIGDYREQQHERLRHLALSLAERVRNSGRSCSTRPMSSYHRRIIHLTLQNYPDIQTRSSGDGILKRIIIQRRRQERR

SEQ ID NO: 350 - protein, 459 aa, Lawsonia intracellularis
MCDTIAAIATPSGTGGIGIIRISGPKSKERLTELFHSVSPKFTDFKPWMLHRGYLVAPTNEFLDDILAVYMPAPYTFTGEDVVELHCHGGHFLLLTILETVLCKNIRLAKPGEFSQRAFLNGRMDLTQAEAVAELIAASSRNEVLLASNRLKGLLGQKIIDIRRRIEELRVWICLAVDFPEEESGIFPLEKFINGLLEIHEIIQKLIHAAERSRCWKEGVTVALAGAVNAGKSSLLNALLGKERAIVTEHPGTTRDFLEECIIVNSLSIRLIDTAGLRVTSDPIEEQGIQKGREKIDEADVILFIIDGTVGVTEESKLLINNFGVERTILVWNKVDLKVPPSNWTELYTSSQVSGICVSAKTGSGIEELLVLLYNFVLSQHNAQEPTFDTIVPNMRQVEVFSLVLEEIRSLYEDIRSGIPYDLCAVMLENISSMLNSIIGFDTPEEVLNRIFASFCIGK

SEQ ID NO: 351 - protein, 730 aa, Lawsonia intracellularis
MQGPPFLIIPWERDFLECLSSIIIKETDGHLDKAAVIFMHDRPRRYLTAYFQQHPELSKPCILPYILTIQELLSCLYLEQHTSLCYEAGLLDQVDLLFSCVEQLSALNVSLFNLLSKGGEVGFFPWGLQLASVFEECFTQGLKPRDLLYTEGEVAPFGTALLASLGQIFLLYKQKLEQEGMTTPALKAYVLAEQIRQSTFDLPSFLKQKSIFLAGFSTLTGTENIIFRYLWEKGAKICLHVDSSLADTGKGHWACSSQAKWIQSWNASTELVFQTKPVKKTWHFFAGYDLHSQLEKLQDDFSLHEDIQTSTAIVLTNSKSLLPILHHLPHKNCNISLGYPLNKSLLFRLLENIFKIRELQQEDGTIYWKSLLHLIRHPYLRFLKIDGFELYSLLHKLEQWIVNGQKYIDLNMFFREVEYEQPHKKYDFSESECLLLKQLIKVTVENCITIDTLAKFADFLSILCDFLLQFGYESWQRFPLDAECLFRLVHKVIPALKDNRMAHTVLSWDLLQSMVVALIHDERVPFEADPITGLQVLGMLETRLLHFSKVFLIDVTDDQLPGNPIRSSLLPDSLRKILGLPNAHDRDVLTAYTFYRLLAGAKEVYLYWQEGIEVSNSFEGKKQKSRFVEEILWEEEQSIGSQITPGDYILNIAKPEVSPPLRRRRHIIKTPAIQRQLNSILSHPVSATQLDTYLMCPLRFYFERVAMVRPVEVVNEDDDPASVGQLLHKY

SEQ ID NO: 352 - protein, 388 aa, Lawsonia intracellularis
VSFLFTLILRFIMSFPSLKIGELCARVPIIQGGMGVGISLSKLASAVAKEGGIGVVASAMIGMREPDVAKNPIEANLRALRREIQKAKEATKGIIGVNIMVALTTFVEMVRTSIEEKADVIFSGAGLPLELPKILLELCEQKKEEFKTKLVPIIASGRAATLIAKRWLSRYGYFPDAFVVEGPKAGGHLGFHEKNLFDPNYALEQLVPGVVEAVKPFEDQRGQAIPVIAAGGVFTGEDIARYLELGASGVQMGTRFVATHECDADDRFKQAYVQAKEEDVTIIKSPVGMPGRALFNTFIDSMRKGKKRPFKCIFKCVKTCEHETTPYCIATALISAMRGNLERGFAFAGANVPRIDKIISVKELITTLQQEFDAFIQSIVPKSQPTVE

SEQ ID NO: 353 - protein, 327 aa, Lawsonia intracellularis
  misc_feature (138)..(138): Xaa can be any naturally occurring amino acid
VHILAADIGGTYSRFALFKDNPLCLIHKEYISSYTTSFTTILQQIMSNSLFASVPLDMCVLAIAGPIDNQEIVKPSNLPYSIIKKDLLSFCKNILFINDFEAQAWSCLTESMSDAVLLHPEPKHNSFHNNNNVFSFNXKSGRLGVIGAGTGLGMAVLELDMYGKTKVIASEGGHSAFPFITNHELEFGNFLCQKKKLNYARLDDVLSGSGLTWLHLFLTKEQFKPEEITLKPEFIDSETHTYFSCFYARICRSLALFSLTQQGIVITGGLAKKCQILVNHPSFKKEFVNIGGEHKKILSRMPIWLNCNDASGLWGAAQAGVIYSSKN

SEQ ID NO: 354 - protein, 482 aa, Lawsonia intracellularis
MNWDWEKLQEKRQRQNWGQGRTPKDSGNNTPPPNGSDPNPEQLFGNFFKQFRLKPNSGKVKWIILILISLWLLSGIYIVNPDEQGVVLQFGKYNRTVDAGPHYALPYPIETVYKPKVTQVRRVEVGFRSTSLGGTFQQGATRTLPEEASMLTGDENIVNVQFSVQYQINNPVEFFAFALFHLGIHIQRQSYYSYLLFFLALCFFLYAFWVRDNAIMASAPIVYYLVTIGFPNWKKIYIFGVSCIILICLFCIGRGINKYMLDAKSECPTMHMKIDEIAATSRIVGKNLFFKESTVHEFPVEELPIVHLDKGWKFYSIVQLTDNLLKENWYSVMRNEPWAYLQAKLRLFNNFSRFPIKTPRCVSYFVMHKNNYGFTFEKGRASDILYSYVNTTKNILPILFLPIFWIPLAGILFLYVLKRNDLLGIEVKMLSSSAVCYYLGYFIVTPTPDYRFIYWIVLATTVATFLLLCDRYSYTSSEFSNI

SEQ ID NO: 355 - protein, 365 aa, Lawsonia intracellularis
  misc_feature (363)..(365): Xaa can be any naturally occurring amino acid
MKKIYTSIHILYILIVTSYILIILYYFITHKNVYANTTNNLYSIISLSSPTNSYKEHYNNVNNQKYKKNIQKNIEYHSSAEKTQKISAKSTLPYPQKIADPPIHSFLQMTSVAIPLIVGGLFLNNSRAEKNIHNLRNDYVPKFNFHYEDYLQFAPGAAMLGLKLGGLEGRSSWARMLFADAISIGLMLPTVEIIKVHTKKKRPTGSSHQSFPSGHTANAFMLATMLHKEYGETHNRWYSILGYTAATATAIGRQLNNRHWLSDTMVGAGIGIMSTEIGYLLTDLIFEDKGIIRPIREPKTIDKNRKPSFLGLYAGINQMSGKTKIDSVEISTGTGANVGIEGALFFNPYIGVGGKFSAANLPXXX

SEQ ID NO: 356 - protein, 732 aa, Lawsonia intracellularis
MAQLDIKEQIVLQGILDRIVFHNSENGYTVFRLKPENSDDIDTVPVVGYLNNPQPGASILVSGQWVNNTRFGRQFQMSTFEIRLPASVEGIKRYLSSGLIKGIGKKTAESIVTEFGEETFHILDTSPEELLKIKGITKKKLDQITECWQEHQTTRELMVFLQPYGISVTYAVKIYKYYGQQSLNIVKENPYRLAMDIHGIGFLTADALATKLGFEKDNPLRAQAGILYTLLKCMDEGHVYYPKEAFIELTSHNLGIDHQCIEDAIEHLKREERIVCEALDEHIGIYLNRYHHYESQIAFYLQRILHSPKSVQFKNTDDTISQVINKLNITLAPEQMSAIVTSTTSKIMILTGGPGTGKTTVLNAIIQVFKENKAKILLAAPTGRAAKRMSEAIGMEARTIHRLLEYSPRNDGFIRNEDMPLACGLLVVDEASMMDIMLTYHLLKAIPLGATVIFVGDIYQLPSVGPGNVLKDLIISQLLPVVELTEVFRQAAESQIVCNAHLMNKGEVPCLESSKEALSDFYFIRQSDPDKAADLIVDLVKNHIPRRFKFDPINDIQVLTPMHKGTVGAASLNKRLQEELNPTSQFLQRGEKIYRLGDKVMQIRNNYEKDVFNGDIGRITYIDMEEKSIVVNFDERLVSYPSDELDELVAAYAISIHKSQGSEYPAVVIPLMTQHYVLLQRNLVYTGVTRGKNLVVFVGESKALAIAIKNNKTQKRHTWLSARLVNGMLQKL

SEQ ID NO: 357 - protein, 385 aa, Lawsonia intracellularis
MRYKNYIAFCMISLFLCLTGCKTFNCVSPQLGTIKDLEVFPQDLQVYSSVLPQDPLITKDRMLDEYALFKKHFFQPWSKDKASVPASTVYSIFDRPNTKENIRWWAENLLPWTDIHWDEVKKNAAISTYPSRKDKGILIQRTSVYAAPTQSSFFLNPQTAGEGFPFNYLIESNLHAGTPVFITHTSTNGDWVFIETDLVSGWVPEHTVALISDNISKWFSSLPQAAIIHDNVALNGRSGRHVTTGYLGTVLPIIKSTPTELVLLAPLRDQHRRARITEVYVSKIHTTIIPHELTASFIADIGNPLLGQLYGWGGSFGHRDCSELMKDLFIPFGIWLPRNSQAQIHAWNYIDTTQLLEDEVYQLMKDKAIPFATLIGFKGAILVYI

SEQ ID NO: 358 - protein, 304 aa, Lawsonia intracellularis
  misc_feature (1)..(1): Xaa can be any naturally occurring amino acid
  misc_feature (5)..(6): Xaa can be any naturally occurring amino acid
  misc_feature (8)..(8): Xaa can be any naturally occurring amino acid
  misc_feature (11)..(11): Xaa can be any naturally occurring amino acid
  misc_feature (14)..(15): Xaa can be any naturally occurring amino acid
  misc_feature (32)..(32): Xaa can be any naturally occurring amino acid
XLHQXXAXFFXNPXXAGEGFPFDYLMEANIHXGTPVVVTHISEDEAWVFIETPFVSGWVRDNVVAKVNSDIIKQFLSLPQASIIYDGVLLKDASGVHGGAGFLGTVLPMVKLTGDTAMLLVPVRDQYGNAHIITAETPKHNVLPMPQVLTPKLLASIGESLIGQPYGWGGLFGRRDCSEMISDLFIPFGVWLPRNSQQQVHERHFINLEHVSKEKFYSVMKTQAIPFVTLIGFQGHVGLYLGMYNDTPVMLHDLWGVHTIDNGHKGRYILGRVIISSLDLGNELCNLNKDETLFSRLEGISILN

SEQ ID NO: 359 - protein, 533 aa, Lawsonia intracellularis
MKITFLGAAKTVTGSCYLIEACGIMFTVDCGMFQGNSIIEKRNFEIQHYHAKELQFILLTHAHIDHSGLLPKIVKEGFHGRIYCTAPTKDLATLMLEDSAHINEMEAQWKNKKYARHGKIEKEVLPLYTVEEAQNVSPLFTPVSYNTMFEPHPGIQVTYHDAGHILGAAFLELVIKEEGKEVRLVFSGDLGRTDSLLMHEPMTPPQADFLFIESTYGDRNHKIDQATFDELVDAIHYSWTHNSKTIIPAFAVGRTQEILYCLYLLKQQNRIPDIPIFLDSPLAIQTTKIFETYNSYLKFNDHPSFKTILDGLSVKYTPSVKESKEINELKGSAIIISASGMCNAGRIKHHLFNNAWKTGVSIVFVGYQAVGTLGRKIVDGAKTVRIFGEDVAIKAKVYTLGGFSAHAGQQQLLDWIGRMYQPQMEVLLVHGEEKAQEVFSKLIQQKYGLTVYIPSYLEQLELTAESQKVIVSESKNIQPVEWSKLTDTIKNNFNNINLKLKNIAQKPWETQICMYDRLVELNQEIESFLNYNK

SEQ ID NO: 360 - protein, 329 aa, Lawsonia intracellularis
MKIKLLQKICIILFLINYSLISGCSSTKIVVPEGNSSDLLEKTQDIKSIEDQDRNISAQAEEAWKNNNMLEAQRLYRIVVTQSNLTAFERNSAWERLIKSSIANNHFHIALEFLTQWKLSDPTANMQPVWQDSWGIAVLKSSRVQAISHAQQVWEDASLPIPLRGIAGGVLMILSPKENKTLIASKLSELYKHSDHANCMMLEQRLFTLLSNSSSEELLALEFLTGPERDFMYPWSIIILDVLRREWPSKTNRTAELLGKINYPGVFSDSSLLASAIHVAEPKSLLVDHTNILFSPGCYALVLPMSGPYSSIGWNIAKGAKWINKYKLI

SEQ ID NO: 361 - protein, 310 aa, Lawsonia intracellularis
  misc_feature (310)..(310): Xaa can be any naturally occurring amino acid
VGMEVVRSEKDLRWLIIIFAVTFFYEGLDGVWQVLTGFDYIKHTAIMSGRLTGSLGTYRVGNYMAIIALPAFGIWTLLPMKNNRLRIVAVAVLLSPGLFLWLGSFTRIGYLALLGALYILWICIWTKFSLLKVIVPPMLLLVVLSMFGIARLSWETMLNDPRIELWIRAIEVGKEHLWLGTGSSTFILALQKQGIILQSVPSMDLGHPHNIYIQFFIDGGLIGFTSYILFFVIITLWTLFHIRRGVQKEIQGLFPGCYWQLLSFIWAGWVAYLITGFCGHDFYRTWWLSTAATLLGILIGGCQWGKKDSX

SEQ ID NO: 362 - protein, 352 aa, Lawsonia intracellularis
MRIAFINATKRWGGVKTWMLEFAKIFSKKGHHVYIYGRQEAFITSAQKEVGHGQLVSFGLDLNPKSILYFWREFRLHQIDIVIVNIEKDLSTAGIAAKLSGIPVIQRIGLPHDIPYRLKTRLIHTFINPSFLCPCEYIASGFKKSLSYIPPQQVKVIMNGRKATSEFLKVHSPLKFICTQQLEPNKCHSVLLEAFARVKGSFEFHIWGTGSEEKTLKQMASELGLTGQVFFHGFSDNIINKLEKGDIFLLASVSEGLPNTLIEAMSVGLLPIVRLVGGVDEVLTPELRDWVLPYEASSEDFQKVISMALSLSVDELTGLRESAREACRRFFDIDIQATKLEEWFYEVVNREV

SEQ ID NO: 363 - protein, 346 aa, Lawsonia intracellularis
MSERKLDGLLVYHAANRYYLSGFELHNPQCNESAGCLIILANGKDWLCTDSRYTEAAKRLWDEDFIYSYGHNIPEQLGLLINKILPKGSCIGFESKVLSVNFFEAFVEQLQDITPVSADGIVEDLRVIKDEQEVRLMEQSCLLNHQLLTWVPSILRPGESEASVSWEIELFFRKHGANELAFPSIVASGGNAALPHAIPSSDTQIESEELVLVDVGARLYDYCSDQTRTFWVGDNPSKRFQQTLALVQEAQHRAIKAIQPGVLAKDVYNTVYTFFIEYGVEKAFKHNLGHGVGLEVHEAPSLGPRSETILKPGMVITVEPGLYYPEWGGVRWEHMVLVTEDGAKVF

SEQ ID NO: 364 - protein, 457 aa, Lawsonia intracellularis
MLQRNFHIITFGCQMNTNDSFWLSCSLQKKGFQEVSLEDASIIIINTCSVREKPEQKVYSILGKIRHATKNNPDSFVVIAGCVAQQLGATFFEKFPQVRLVSGSDGIAMAPDAIERLYAEPDLKLNLTDFSEYYPEREYAFSKLTLSNNNTLALMAYVNIMQGCDNYCTYCIVPYTRGKQKSRSVQAIVEECQQLIDSGVKEIVLLGQNVNAYGLDKDKNSPANGVNFAMLVHTIASLPGLERLRFFSAHPKEFSSELIDLFGEFSTLCPRLHLPLQSGSDKILRRMGRKYSMDEYISIITKLKKVRPDIALSTDFIVGFPGETEEDFLQTLQSINTIKFMSSFSFCYSDRPGTRSSTFSNKVDHEVKIKRLEQLQATQLEHSTSWLKSRVGVETTVLLEKVSRKKAEDNNSWQGRDPWGNVVNVILPQSTNISNTLLPVRIIASKKHSLVAEPLII

SEQ ID NO: 365 - protein, 440 aa, Lawsonia intracellularis
MNLELKKALDQISKDKGLDRDMLVDTLEDAVRTSVIRRYGDNLDVEVSYNDDTGEIEVYQFKIVVEEVTDPITQLSITEAKTHDPSAQLDDEMGFRLKVEDLGRIAAQSAKQVIIQRMRDAEQEIIYEEYKDRIGEIVSGIVQRRDKGGWIINLGRTEALLPKDEQIPKEHYKRGDRVQGLIIDVRKEGRGPQVIISRAHRDYMAALFRREVPEVDDGTVQIMGVARDPGSRAKVTVLSRERDVDPVGACVGVRGSRIQNIVQELHGERIDIVIWSPEITTYARNALAPAIISRITVDETENLLEVTVPDDQLTSAIGRKGQNVKLAAKLLGWKIDIFTETRYNESNAVGRGLEQVASVAEISIETLLHSGLNTLEQINETSDEELIEKLGISESQVNDLRAAVNFLSTTATVDSNKKKKEVEAEQAKDNENNPADTADY

SEQ ID NO: 366 - protein, 357 aa, Lawsonia intracellularis
MSDDPSKTEKATPKRRQEARSEGSVPKSEEVTKALTTAAGMLGLAIYSGVMGRHFETIFYYIFTESFRFEVTAQSVYALFIYVAQEIAILLMPILLFIAVTAWISLRVQVGALWTTKVFKFKWSKFNIIKGLKGMFASQQTLVRLLRSLVQVIVIGIVPYMIIKGEFSNFLPLYYASPSGVADYMLNTGIVLVLYTLIPMTIIAVADLVYNRYSYEENLKMTKQEIKDESKQQEGDPIVKQKQRQKMMQMMTNRMMQDVPKADVVVTNPKHIAVALRYNALEAPAPLVLAIGVDRVAEKIKEIARENNIPIRENVPLARALYKAVGVGEMIPEELYKAVAAILASVWRLKGKMPGPQ

SEQ ID NO: 367 - protein, 677 aa, Lawsonia intracellularis
MASGPSINYSRFAKQGDIFLGAGVVVILLVMLVPLPTFLLDVMLSLNISLSILRSLTAMFMTSPLRVFYFPLLSPLLWKKVKQGISAGRVQSVALRLIVERDEERYTFIPEEYWLFKANLEGSNPPPFKVELWKVNNKKPIIPDAVTAAALEQQIKDKPFIVDSIEEKERQRSPKPPFITSTLQQAANQRLGYTAKRTMNIAQRLYEGLELGDKGTTALITYMRTDSVRIANEAKLAAATLIEQKFGKEYLAKGGNGRNFKGKAGIQDAHEAIRPIDVTILPEDVKPYLAPDQYQIYRLIWSRFIASQMSVAQFHDTIITINCENSQWRTKGERLLFPGFLAAFPNTKEEEDTNLPVLHKGEILKLHSLIKEQKFTQPPPQFTEASLVRELEELGIGRPSTYASIISTLQDRDYVRLEDKHFIATDLGRVVCMLLQDYFKNLMDVTFTAHMEELLDKVAEGKQDWVELLQNFSETFNPTLEEATKAMSQVKTGLETDINCPDCKKPLVIKFGKSGQFLACSGYPQCKFTSNYLRDDKGQIHLQEKVQPELQKIGICPKCNKDLVLKKARTGSRFIACSGYPECNYTEAFSTNVPCPCEGCKGMLVEKSSKKGKVFYACNTYPTCDYAIWNWPIQKSCPTCSFPILVEKITKAKGKHLACPEKNCRYTCELEESDIET

SEQ ID NO: 368 - protein, 373 aa, Lawsonia intracellularis
MAYCTYNCEVIAVTADLGQMNFHDIEEKAIVTGASKAYVVDLRNEFAKNFIFPMLRASAIYEGRYLLGTAIARPLITKLLIDIARAEEADAIAHGATGKGNDQVRFELAAAALAPDIHVIAPWREWDLISRTALTTFAEKHNIPISTSHKRYSKDQNMLHCSIEGSELENPWEEPHIESYTMTVPIEHTPDSPEYITIDFEKGDPIAINGQQMIPADIMFTLNDIAGRHGIGRIDMVESRFLGIKSRGVYETPGGTIIHIAHQDLEGITLDHMTLLTRNQLIPSYADAIYNGFWFSPEREAIQAFMDKAQERVTGTVKLKLYKGMAYPIGRKSSNSLYSSQLATFEEDTSYNHNDATGFIKLKSLRIRGYQKS

SEQ ID NO: 369 - protein, 412 aa, Lawsonia intracellularis
VNNLLQLHIVILWITLIMTMLGWTRISILLCMSYAALAICIQQAVGFVRLANIISKYIPQEGFHGLFSGMLLAVALPAILILAISITGLWILAYPGGAYLITHITKLDFSIGKVSFSLVQILFLVSAFYITRSFVSVGRMFIANLPKHNMGMDRTLIGPIQTGFTYTLWAVFFFSTLYMLGVSLTSLAVVAGGLSVGIGFGLQNITNNFISGLLIIFGQTLREGDIIEVGNNLTGIVRKITIRTTLVETFDNATIFVPNAELLSGRLTNWTRNGRTVRKDINIGVAYDSDIGLVMGLLKEIADNHSQVLRYPEPMVVFSDFAASSLNFILRFWVGDLSQAPDIITDLRVIIAKRFTEKNIDIAFPQLDIHIRNDSVLALRRISPMASSELQPTKSIEDLPGVTNNKPIIANS

SEQ ID NO: 370 - protein, 363 aa, Lawsonia intracellularis
MVFVTAGMGGGTGTGAAPIVAQAAKEMGALTVGVVTKPFVFEGHKRSRSADYGISQLREYVDSLITIPNDRLLTIAPKNAKLTDMLKCADDVLYSAVRGISDLITVPGIINVDFADVRTIMSVSGLAMMGTGFASGEGRAIEAARRAITSPLLEDVSITGAKAILINITATTELGIDEYSDAANYIHEAAQGSGDTNIIIGTAFDEEAGDEIRITVIATGIESQVGVKMQGSTSSKAAMPSFRKSSHITNTTSFKPEAIKHNLASEKPRYRTPRLLTNPIEMDYKTQGDHSEIFTEDTGVNYSIPTYLRALLGKQGAQSSKEEYDRTHHGDNNKKDTHNPGHENFVFDGNEQDIPIFIQKQAN

SEQ ID NO: 371 - protein, 259 aa, Lawsonia intracellularis
MKPYSNLIFEVTPRCNAICYYCPTGRANLFHEPSNQTPLTPEFLHKTLTYMLNEGIINKNTIVDLFNKGEPFLHPNLSDIFDVMNSLGLHYTLSSNGSVRASFNDTTLLKNLDRIIFSMPGFSDECYKAAHGFSFEKTKQNIVRLLTELRRCGFVGEALLVFHIYIYNFEQLKDAEAFANEHGMILHDYLAYVVDYRVFKDFLSGKIDLNTKERISKDLFLHDEKQLNKILNSSPSNYWCEHERVLMLDENANVVVCCV

SEQ ID NO: 372 - protein, 433 aa, Lawsonia intracellularis
MRKKKTPPVEEVQEGTTMSLTELKTMNMPKLMELAEDYTIENASSMRKQELIFTLLQACASRSGGIYGDGVLEILSDGYGFLRSPLSSYMPGPDDIYVSPSQIRRFHLRKGDIVSGQIRPPKEGERYFALLKVKEIGYEVPDNAKHIVLFDNLTPIYPNQRLLMENGDKNYSCRVIDLMSPIGRGQRGLIVAPPRTGKTILLQNIANSINANNPDVYLIVLLIDERPEEVTDMERTVNNAEVISSTFDEPPQRHVQVCEMVLEKAKRLVERKKDVVILLDSITRLGRAYNAVTPSSGRVLSGGLDANALQRPKRFLGAARNIEGGGSLTIIATALIDTGSRMDEVIFEEFKGTGNMEIYLDRHLAEKRIFPAIDINRTGTRKEDLLLPEDVLNRVWILRKLLAPMSSIDSMEFLLGKMRGTNSNEDFINAMSK

SEQ ID NO: 373 - protein, 309 aa, Lawsonia intracellularis
MASATVIPGDGIMWNFLQLNNNNAFVVYSRSPGIVSDSPVNVTQGNFKDGSFIFIGFNPELFLEVQDADKEQSLLSICTILFFCLLLLLSFIFFRNFGYIQKTYNVINALTEYVVLTSKDGLMLLDSAGAVLQMNPAAAQFFHISNPIIGSWVYLSNKKHDELFPPIFYDVIKQVIEQGKLEETELFLSLAGEEHYIIVQGNSLDTFKKGQPEYLLSFRDITKIRLLEKDLYQKDTLASIGSLASGVAHEIRSPLSSIKGYVNYLGDRLPYDSSDQELIKIIMQEIDRLNRVISDLIGLSVPTDGYMCI

SEQ ID NO: 374 - protein, 434 aa, Lawsonia intracellularis
  misc_feature (304)..(304): Xaa can be any naturally occurring amino acid
MEKNNLREQSLKAIKKNIEWIPSWGEDRIYNMIASRPDWCISRQRIWGVPIVALICESCGEVWNDPSWMKKIAEFFAIHPRGCDYWYEAKLEDIVPVGLKCPHCEGEQWKRESDILDVWFDSGSSFAAVLEERPNLGFPADLYLEGSDQHRGWFHSSLLISIGTRGVPPYHAVLTHGYVVDGDGRKMSKSMGNVTSPQEIISKFGVEILRLWVSSVDYREDVRISNEILQRLVDAYRRIRNTCRYLLGNINDLTLDELVPVKEMESLDQYILDVVATAYTEIQKSYISYDFHTVFHKLHNLCTXDLSAFYLDILKDRLYTSGVRSHKRKSAQTALFYILHMLLRSMAPILSFTAEEVYKYIPDTLKDDNVISVFMLPFFETSSFLLDDRVRSYWETLLLIRAEVNQAIEPMRKKGEIGHSLDTHITICRDRQSY

SEQ ID NO: 375 - protein, 477 aa, Lawsonia intracellularis
  misc_feature (235)..(235): Xaa can be any naturally occurring amino acid
MIQTSPIPVNLSLPYKIADISLADFGKKEMQLSEREMPGLMTLIQRYKEKKPLKGLKITGSLHMTIQTALLIKTLYYLGANIRWASCNIFSTQDHAAAAIADLNYASVFAWKGETLEEYWWCIEMALTWPDGSGPDLIIDDGGDATLIIHKGVEIEKNPELLKQSHSDKEIKIIMDRLKVMYNTSPTHWTKIAKNIRGVSEETTTGVHRLYQLAEENKLLFPAINVNDSVTKSKXDNLYGCRESLADGIKRATDIMIAGKVVVIAGYGDVGKGCAQSMRGFGARVIITEIDPICALQAAMEGFEVMTMEQAAAEGDIFVTATGNLHVITHNHMNKMKDEAIICNIGHFDNEIEMSWLENNSECKKVNIKPQVDKWVLPNGRSMIVLAEGRLVNLGCATGHSSFVMSTSFTNQVLAQLELAHNKLENKVYILPKKLDEEVARLHLERLGVTLTTLTQEQADYIDVPIEGPYKSEHYRY

SEQ ID NO: 376 - protein, 393 aa, Lawsonia intracellularis
MIDKYLLFHCQELLQIHLGVCGSIAAYRAIDLVRAWKDVGLSVSVTLTPAACNFLNPLAFSSVGADPVYTTMFDDIRHPYSHLEPGKTAQAFIIAPASASTISRLAYGQADELLACQALAFSGQPIIAPAMNPNMWNHPSTQQNIKILQDRGCIVIEPEQGRVACGDEGQGRLADLRDIYLIGLKSITPQDFAGLRILITLGPTREPWDGLRFWSNPATGIMGVSIAVAAWMRGAEVHAVCGPGSPWLPLGIHRYSVTTALQMFEVAESIWPTSDIGIFVAAVADFSPEKGPEGKFKKDEAGDGFTLRFIRNTDILQKLSNNKARNQKVVGFALESEGLEQAVQNKLYVKKADMIVGNYIKDSVASLSGSVFILNEKLPNSFKLILFKQYYNI

SEQ ID NO: 377 - protein, 590 aa, Lawsonia intracellularis
  misc_feature (270)..(270): Xaa can be any naturally occurring amino acid
MEDSNMRWKDISIFKKLLIGFSIVILAGVIGLANDYFEVTRIRNITDQVLLAVNYRKAILNAEVAHLTWVNKVANYLIERGKNELHVELNDHLCTFGKLLYGEQRKEIEERIPETKSLFLFIEGPHNRLHQSVIGITAAMGEGKINEASQIFQNVTLKELDLIRTTLNKLVVVFDARSTVLEDSLINTIHFALVVILLCVAVMLIGGLLLSLFLGRSIVRPIWKLVAYAHEVSEGNLKDPTLNQKDEVGQLAGTLGIMVNKLKKTIEEAXMKADEAYRKEEEANAARVNTESAIQEVKKKQQELQDVTVQLKGVVDVLSSASKEMSTQIETSERGAILQAKRINETATAMSEMSSSVLEVARNANVAAELSAEARTRAEEGSGIMNNAVESIYEVQKHSLMLKEDMQILTQHAQNIDQIMSVISDIADQTNLLALNAAIEAARAGEAGRGFAVVADEVRKLAEKTITSTADVGKAIGAIQHSVEKNMGQVDKTVQSIESTTDLSTKAGELLRNIQEMVESTASQVRSIATASEKQSATSEEISSSIEEVNQVAKETASAMVSLNKAMVDLAAQSRGLQELIRKLEQETIG

SEQ ID NO: 378 - protein, 423 aa, Lawsonia intracellularis
MSINKSSHRSFRIICYPNEISLVENLLSEQGFIFEPDPFLYLARKIIYEPFPLGKSLAAFFGLIYIQDRSSMLPVLALQANVGDIILDMCASPGSKTTLLSQLVGNTGLIVGNDPTKSRLLTLRNNLGRLNCFNTVTCSWPAEKLPMPDATWGKILLDPPCSGWGTIKKNPQVTKIWQGERINPLIILQKKLLTEATRLLIPGGKIVYSTCTTNIDENEAQIQFAITNLGLKLIPLELPLGFSVIKPISPSYEGVIRLPNTHDSQGFFIACLQKPGKNTTKIDTTNEKIDISSYPHYSLDTLGPFGIDITKLPQGNLVDFNSNLHFIPHAALTYLPYTLYWQGPIIGKTSKTNILPSPRLRLLQSTTDLAYCLHIDNVQQLEKITQGQSIMTDFKGKEVPLFWKELPLGRLKVKNGRVFWSEK

SEQ ID NO: 379 - protein, 547 aa, Lawsonia intracellularis
MHQKSCLVALCIMFIIMVQVLQANAASYVVLPFKVNAPPSYTYLEKAIPSMLTSRLYWEERFQPIPDANAIKAGKVEDIKEMDKARIATGADYLIWGQVNIVGDEATLDVQVCDIEGSIWRKSKNTKVDNLITALQDTADAINSELFGRATTKPSSKATIVAQMNSGLIKGKGNENQSYLNPEFRYQGSNLSRGRSQALPFASVGIVVGDFIGDNKNEVAILSEYKVHIYRWEEERLALLGEYKFPRSLQSLHIRAFDVDHDGVQEIIVSCFDPSYAKPYSFILSFKNRVFKELATNLPFYLNVVKLPPDFSPMLIGQKSDNSRIFSPSGVYEIEKHGRNYIMGNRLSLPKEANIFNFSWLPSDSLKDEEAKLVLVTNNERLVVYNTKGTRLFMTEEVYYGSSVGIDEPSNMPGLGKSKELIPSKYFIPGRMIPINLDSMGKWELLVSKPISVAAKFFENYRSFAEGEIQALTWDGLGLGLVWNTRRIKGTITDFALADMNNDGKLDLVVSVNSHTGILGLEKRKTIIVFYPLEVDKQGIPKAVEDN

SEQ ID NO: 380 - protein, 567 aa, Lawsonia intracellularis
MLRSLRTWLYDADPLIPLRWEKPLSDIKQRHANGEKIFEKAIRKWFIENKHKSIVTLIPDSKLAEQRENDEQKQLKQIKDSLSELEVNQLIKDTITLQENQQCPDTPEALATIPSLTLKDLPPKNAVIPCIVENDKQITILKHPIDTSGIVYVECLFSLDAVPDDLLYLVPLFGRCLTELGTHKHSFVELGVLLASKTGGIDISPLITTTRGTQLPVAKLCISGKATEDHITDLFSILEEILLETQFDLKDRFLQMALEERARIEQALIPAGHNVVITRLRSPYSIAGQISENIGGVSYLEALRNLTERIHSDWHSIHTDLTKLQQIIINKQHTIFNITASETLLLKTLPLINQIEYKLPYVENNPILRTTKKPLIGEILQVPSQVNYVGKGCNIYELGYKWNGSAHVITRHLRMAWLWDQVRVQGGAYGVFCTLDRMNGSLTQVSYRDPNVERTIKAFDQSANYLKNLQLTDRELTRAIVGAIGDLDSYMLPDAKGMASLTRYLTDDQDEIRQHMREEILSTTKKQFTEFAEVMAEVAKTGSVCILGGSAATDIAQQNNWVIHQLL

SEQ ID NO: 381 - protein, 572 aa, Lawsonia intracellularis
MSKRVIIIGAIAAGPKAASRLRRLEPTTEILMVDKNEYISFGACGIPYYISGEINSIDSLRSTAYGVLRTPEYFQQKGITTYNRTQAISIDRKQQIVLLKHLLTNKEYTVSYDKLVLTTGSKPKLPTIKGQHLKHIVTISNTSLDSAQHIQTLCASKKIKHAVIIGGGFIGLEMAVSLAGKWKIKTSIIEVKPQVMPGYVSPDFADMLCHDLTKNNVEIFTSEQVLQFKGKNDSVNYLITDKRKIETDLVIFATGFLPETTLAQEAGLALDPKTGAILVNPYMQTSDPNIYAGGDCVAVPNPITGEHSWFTLGSLANRQGRIIGTNLAGGSDTFPGAVGNWCIKLFTLSACGAGLTLEKAKSLGFDAISASIEQADRSQSYPEHSIISLELIVDCSNRRVLGIQGICSASDVVKARIDAITMLLQYGHPTIDDISNAEMSYAPPFSSAMDPINVVANVADNILSGQLESVTSKTFTTMWNDRKNNTIFFVDTRPTTASKELKEKYPNEWHTIPFEEISSYLSELPKTQPIALICNTGLRAYETMSYLRGKGITNTIDVLGGMYAIKKRGEEL

SEQ ID NO: 382 - protein, 477 aa, Lawsonia intracellularis
MSSIVYFFLSLIALFLGYIIYGKVVERIFGADYSRVTPVYKMFDGVDYVKMGPFKIFLIQLLNIAGLGPVFGPILGALYGPIALFWVVIGSIFGGAVHDYFSGMMSLRYNGKSVPDIVGYNLGSTIRILMQVFSVVLLILVGVVFVAGPAGLLEKLTGIDAMFFVSIIFAYYFLAMILPIDKLIGLIYPYFALLLVFMAIGLLVMLIVKGYPFYPSINLINQHPAGLPIWPMVFITIACGALSGFHATQSPMMARCLPNERYGRPVFFGAMIAEGVIALIWVTLGMSFYENSSALAAALGPEGNAALVVDEVSKVLLGTVGGTLAILGVVILPITSGDTAFRSARLTIADAFGFDQASGKNRLLLTIPIFAIGVALNFMSFGILWRYFGWANQTLAAIVLWAAAAYLLHRERFHWIATVPAMFMTAVCVSNICFEENMGFGISYDLSNIIAITFSVSCGITLLTVGRKRQPDEPIDS

SEQ ID NO: 383 - protein, 332 aa, Lawsonia intracellularis
MKRSELMLGEYSITEIIIFLIIIVSCLWFDLHAHKSDKVISVKNAFLWSSIWISLALLFAIYIGCMFGLEKAQLFLTGYLLEESLSVDNLFVIMAIFASFSIKDEMQHRVLYYGILGALVMRLLFVAVGSSLVTLFGPYALASFGIFVLWTAWKMWKEQKKKHSEIIDYSKHWSVKIARWLMPVHPQLDGHNFFIKVSEHNRLIWKATPLFLCLLVIEFSDVMFAFDSIPAIIAITQEPFLIYTSNIFAILGLRSLYFLLAAAKRYLRYLEKSIIVILAYIGFKMLLDVVGIIHISPLVSLGIVIICLTIGILASLFIPQTTTLSHNNTIHT

SEQ ID NO: 384 - protein, 481 aa, Lawsonia intracellularis
MIKVKKFFLNFTTRRTLILVCSDCIALLSTVIIAAYIRNIFTPVEFSQHWTLLLFLLVAIFVNYMKELYDATPPPLPEEVKSLSLSVSLAYFCIAIYLFFFRADLPSRLVYMASWMASLIVVPVIRCNVRQYFSRKSWWGIPTIFLGNGSILSLIQKYLVKHPEFGLTPMGYAYSINQTIEDKEDKTSDGYLKPSLMYLETEQKIKQFVSNHPRSCAFVLLSKDDIYHTKLEKVATTLFSSIILVSEDFFKCGIPLWVRPLEIGSFLCLKVRQNLLDPRKLVVKRCIDLILSIIIGIATFPLICFIAIWIRLESPGPIFFRQLRIGREGKPIWIVKFRTMVQNAEQVLQKTLDENEELRNEWKADQKLRYDPRITKVGKLLRRTSLDELPQIWNVLLGDMSLVGPRPIVEEEVARYGDAYALYIKVRPGITGLWQVSGRNDLTYNQRVQTDWYYISNWSVWLDIVILARTIPVVVKRKGAY

SEQ ID NO: 385 - protein, 367 aa, Lawsonia intracellularis
MRIAIVHYWLIGMRGGEKVIESLCRLYPQADIFTHCVDKDQLSPLLKNKTIYTTFINSLPFATRYYKYYLPLMPLALEQLDLRGYDLIISSESGPAKGLIVHSSARHICYCHTPMRYLWDCYHTYLENKGIVTRTIIRPIFHYLRMWDISSAVHPDIILANSHTVAQRVQRCWGRSASVIYPPVELDLFKPTRDVGDYYLCFGQLVEYKRVDLAIKVASETGRKLIVAGDGDAYTKLKQLAGPSVIFIGKISMDERAKLLAGCRALLFPGEEDFGIVPIEAMASGRPVIAYSKGGASETVSDGITGFFFHEQTPEALLKAIEYFEKHEHTINTQQLVKHASKFSETQFHQAFSKVVDNLCASKDNIQ

SEQ ID NO: 386 - protein, 473 aa, Lawsonia intracellularis
MKLFHVLFLVLTILFFIPFSVLAATGHYELHGTELSIIWVIPFICMLLSIALGPLIIPHFWHHNFGKISVFWGLAFLIPCAVIFGIPLTAYQLLHTIFLEYIPFIVLLLVLFTVAGGVRLKGHLIGKPIVNTGLLFIGTILASWMGTTGAAMLLIRPLIRANEHRKYVIHSVIFFIFLVANIGGSLTPLGDPPLFLGFLKGVHFFWTTTHLFPMTVILSILLLTIYFILDSILYKKEGSPLPQNISDNPGQLGIEGKVNLILLLCVVLTVLMSGVWNPDISINIYGISIALQDLSRDIILLLLTGISLKLTKKESRKLNGFSWEPIQEVAKLFIGIFISMIPAITILRAGEHGVLAPVIELVFKDGQPVNSMFFWLTGILSSFLDNAPTYLVFFNTATGDATHLMGEWAKTLCAISAGSVFMGAVTYIGNAPNFMVRSIAVTHGISMPSFFGYMLWSICILFPCFILLTWLFF

SEQ ID NO: 387 - protein, 367 aa, Lawsonia intracellularis
MSTTMSILKNCILYFLHTSNKIFLYRYIHKKYYIFFLAQLLSMLYTCSSIAKVNEKSVSSTRITHQEQQNIASEFIQAQQEYINIKNLLNMNFLYFDELQTSYLESLTTQNSMIDLYLNTISREGEDSFNYEEIQRMKVNQQRLTGQLTYILQSITSRMQELQANIVAIEEMQLIVGQQEGISEIIALNNDHLQRILNSQQFIYNSIFNEHLMLRFRIMLVEKIEQARQQGHPLPPFPNKEIRMGNSILQEVILKDPPKKRESSLRKRCLETDLSSSSDEEAKLSPQQLVQRQIGQSSDYDASSEASDEESQPYPQSSRSVYLFPRNIQSSKDRTSSLVAIYKKLTLLNIWQLSRLKSLVKQFKGSN

SEQ ID NO: 388 - protein, 380 aa, Lawsonia intracellularis
  misc_feature (100)..(100): Xaa can be any naturally occurring amino acid
MKQLQSISTSLNNLIQYMYEAHIRVDTSDAILRMTESYIETFTIVQNDIFNMLINESSMVRRLLQTATNDIKNGIDVSKHIHSLNNLLSNTYKYEVKINXIKQNQQKYIHDRHNVITNLLALEESVTEKLQSTQQLILSMVMTIPQYVRIPYLLEAIQQRLSNAQHQIPQLEAALDDLKSKISSCAGGHIKNVELVQELQSNLEKALMLLLESENGLRSVILKGKDQGPKPPPPSGGASASMANFSLGEGSAAFVSGYDILGNVSSLQELQCIFGNAITQVSSILKMWSLRNTFCIHETKCNIPHFFHSDIFRKKEKKISDLSLPQLSLLSHLSAPYHMFSSVEGYYKNLEYKPHAIQAGVIVFPVTGLQLGVSYDFFRK

SEQ ID NO: 389 - protein, 323 aa, Lawsonia intracellularis
MLSLKTMAISLKQNYAERELNTIVTSPKLRFCKTAIEQPVSSSQPSLDVFIPFQGFSSTDKYSSNGEDKLCSAQIGFVMCPTEKFTMGVGYDYVHEIPRKYKEDSTLVTKTRSTIHIFSSIFSWNTNGVGFTGHITGCCGWGDINNTRYFIHGRGKASSKGMPRINLSGGLLQIGYNFPISNVMTITPYIEGMLTTVAWNAYHESIGPVRCKVSDYRETSCEKSVGLRHSYTPSSKTQLQLWIAGVLGQYNIGKLHSDTLFSDYSYHTTVPLKRKNYEHAELGINYEVYVSDLCTIGLYSIIIFSHIQKPTDKTMRVSLQYMY

SEQ ID NO: 390 - protein, 386 aa, Lawsonia intracellularis
  misc_feature (5)..(6): Xaa can be any naturally occurring amino acid
MVGYXXKRALITGITGQDGAYLAEFLIRKGYEVHGIKRRSSLFNTDRIDHLYQDPQVENRKLILHYGDLTDATNLIRVIQEVQPDELYNLAAQSHVKVSFESPEYTANVDGLGALRLLEAIRILNLIDKTRYYQASTSELYGLAQEIPQTEKTPFYPRSPYACAKLYAYWITVNYREAYGMYACNGILFNHESPLRGETFVTRKITRGLARIALGLMSTLYLGNLDALRDWGHSRDYIQMQWLMLQQDKPEDYVIATGRQISVREFVNIAANELGITLSWKGSGVDEQAIIETIDATKLAQMLRRPVSEAPLKVGQVIIKIDPRQFRPTEVDSLIGDASKAQQKLGWKPMISFESMVTEMLQEDISLATRDAVCKIAGFKAFNHDE

SEQ ID NO: 391 - protein, 335 aa, Lawsonia intracellularis
MNPRVSRSSALASKATGFPIAKIAAKLAVGYTLDELRNDITYKTSAAFEPAIDYCVVKIPRFTFEKFPGAKDELTTSMKSIGEVMAIGRTFKEAFQKGLRSLETGLPGFNSSNYTFTEEELPILLRNPNSLRIVAIHQALSSGMSLNHIHTLTHIDPWFLYQFKELIEMELILHNFALSNTITASNPELRPLLLKAKQFGFSDKQLAIAWERPESDIRNLRKELDIVPTYYLVDTCAAEFEAFTPYYYSTYESAKELSLEKKKKVIIIGGGPNRIGQGIEFDYCCCHAAYALKDSNIEAIMINSNPETVSTDYDTSDRLYFEPLTFEDVMNIIMD

SEQ ID NO: 392 - protein, 710 aa, Lawsonia intracellularis
  misc_feature (13)..(13): Xaa can be any naturally occurring amino acid
  misc_feature (64)..(64): Xaa can be any naturally occurring amino acid
MNFSATAKLIEIXLFHYRIKLIFEYPQAVKRLLQAQGVADLEALGLEKHTILVQACGALVAYLXQTQLQDVNHLMPFKPLDIGKYVILDEITEKNLELFKRVNGKKGVGTLIHVLDHTLTPMGGRLLEERLHHPWRDITTILENQSVLEWLILYKENMKKLQDALKAIYDLERLSTRIVLNRTSPKDLLALKNTLLILPRVKDALIVEINVKDNRYITIDESILSTMPTILRQLLTKWDNISDYAEKLDKALDENPPNSIVEGGLFKLGFNAELDELMDLLEHGESKLQALLEKEQKVNNLPRLKIGFNRVFGYYFELTKSAGTPPSHFVRRQTLANAERYTTEELKDLEERLLSATEKRNTLEYKLFQKLREELVSIRPRILFMASLIAQLDLWQSLADVAIRHNWNKPTLLTNNNIFIREGRHPVIESIIGKSVFVPNDLVMDETRRMLLITGPNMAGKSTVLRQTAIICLLAHMGSFVPATEAQIGICDRIFSRVGASDNLARGQSTFMVEMMETARILRQATSRSLVILDEIGRGTSTFDGLALAWAVAEDLVCKDHDGVRTLFATHYHELTALEEKLTGVHTMTIAIRHWNDELVFLYRLIPGPADRSYGIEVARLAGVPQSVIQRAKIILTQLEQTHQQPRSLLNLLPGVVQNANEELSKQDVKVVEHPVVTLLKEMNPETLTPLDALKSLVEWKLLYGTTHAT

SEQ ID NO: 393 - protein, 359 aa, Lawsonia intracellularis
MNKCIHIEGARQHNLKNITIDIPREKLVVICGPSGSGKSTLAFDIVYAEGQRRYIESLSTYARQFLPQMDKPDIDKIEGLSPAISLEQQTTGRNPRSTVGTTTEIYDFLRVFYARLGKMYCTGCSKPIEARSVDEIIADILALPEGTKIILLSPLVELQKGTHIEKLKKLKADGFVRVRIDGILYTIDEAPSLDKNKKHTIELVVDRLIIKNDIRGRLADSVELALRYGGGHVIIHEISISDEKKGIDTIHATESVCTSCRISFPTLTPQFFSFNSPQGACPRCSGLGTIEYFEPLLIAPNRGLSLNTKAILPWANPKIFHRYESSLKELGRKYGFNLSTPLSEFNAEALDILFMGEQI

SEQ ID NO: 394 - protein, 582 aa, Lawsonia intracellularis
MQVNQRWSGIIPILEQSLQYGDMWRDILSRYLQNMDCPVCHGARLRTEALAVQIQGVSIQELCTIPVSKTLNWLQQVIFSGRHAIIAEPLLKELIHRLKFMINVGLDYLSLGRTMTTLSGGEAQRIRLASQLGSGLVGVTYVLDEPSIGLHPRDNERLVSTLRSLQKRGNTVLVVEHDEATIRESDMIIELGPGSGLHGGEKVFQGSFRQLINESNTLTAKYMRGDLTIPIPDKRRQPKNYLTLQGITTHNLKNITCSFPLGTLTCVTGVSGSGKSSLVVDTLYKHLALAHGIRVDQPGIIHGIQGIEKVERTISIDQTPIGKTPRSNPATYTKIFDEIRNIFAMTPDAKKRGYQPGRFSFNVPGGRCETCKGDGQLRVEMHFLPDIYVTCDICNGKRYNHETLEVRYRGLNISEVLGLAVHEARKFFTNYPILERKLAILEEVGLDYLQLGQPATTLSGGEAQRIKISRELGKRSLPGTLYILDEPTTGLHMHEVGKLITVLQQLVDKKATVVVIEHNKDVILASDYVIDLGPGGGENGGHIVASGTPEEIMQDPQSITGKFLLEEVNVQRSYHTINGITL

SEQ ID NO: 395 - protein, 288 aa, Lawsonia intracellularis
MEEGNFRCDANISLRPYNSKHLGTRTEIKNLNSFRNVQRALEFEINRQQDILEDGKTIIQETRLYNSDKDITTPMRDKETAHDYRYFPDPDLVPIYVTIQEIEKWKGEIPELSDSRQKRFVIEWGLAHQDAEILTSSRELADFFEKAVKLYPKPKKIANLIKILLLHMLNEHNITIQQCTMKPEAIAELAAIIDENLISIKIAHDIFEDLFSKQLMPKDYVIKHGLTQISDTKTIDTIVVEVLAENPTEVAAYKNGKTKLLSFFIGQRTSWTNKTRDRLLPCRNYPVC

SEQ ID NO: 396 - protein, 358 aa, Lawsonia intracellularis
MYNVLSQLYNYQAELNIWQCDTPKIFNYSDGDEIEDRLYTILKQVEDKSILSDELQTFQKDWATTYHLSASRANLLRPIEKTLLKDATVLELGCGCGGITRYLAETCAHVCSVEGSQRRASITALRCQDLTNITIISDSIYDLSPKIGSFDIVTLIGVLEYARLFGGEYAETRLLKKACSFLKPGGALIIAIENKLGLKYIAGIPEEHLGTSWTGVMDGYTSDGIVTFNRKELEDLLIQTGFSQLQQFIPLPDYKLPTTVLHPEGIVAEEKEFQRAPLIAASSRSFEEKPLFNIQQVWKGICNTNMLANMADSLCFIAWKTYESDKTIHSWPKKYSSFTLWNIHSKTIRQRNSIYSFR

SEQ ID NO: 397 - protein, 367 aa, Lawsonia intracellularis
MKFTSFDDVQNFLDNLGLFNIDLELTRMNQALTKLDFNSLPYKVVQIVGTNGKGSTATFLASLAKSHGLKVGIYTSPHFVTPRERICINGEMLSPEVWITLTERILDNTLSLTYFELLTVLAIVAFSEFKVDLAILEAGLGGQHDATTAVPADLVCYTPIDLDHEQFLGSTVEAIAKEKSQAMRFRKPVLSSFQQPEVMSILCAMAKEKNCSFQSLEQISLVYDLFYPNLDGSQTKSEYLTLGMAGKHQRVNAQLALAAWHVLSQNFGWDFNLNCIYKGLAHAFIPGRFQYVPPNPSLGCLPTILDGAHNPHGLEACIAACKSMRFRQRCKESSCRTFSICPNYLNNFIWQRIKIKFGQCLIHSSKL

SEQ ID NO: 398 - protein, 301 aa, Lawsonia intracellularis
MYLGMATSMLFLFTRSIGRHCLLENAYLMVFTFILIGLLPLIRPFKQRIYLPAWLFIPAIIILLTYNNFVFISPEALKIPLVSWNKETLERVTYTDNYKPVIQFLQQKLKEKETFIELLNGHGLYTYTHKKNPFYLPNISLYATDNAQKVLVKNLEQQFNEGKIPLAIVASPFWGGCIDGMPSTANHYRIAEFIYKHYVPYRNILGFEIWAAKGSRFEKEALPILQSPAEVMIPINAKGTYYGKNSNITVTDNILSINYGPYLPMVSPSVINMMTATNMDPIDISSYKVCTFELELTNDLL

SEQ ID NO: 399 - protein, 436 aa, Lawsonia intracellularis
MNNTPWTFSIVTFGCKVNQYESQSIREAWSNLHGEEVATPQTADIILLNTCAITANAITDARQLINKLHREAPNSKIILTGCATDLTNEALYKLPGVYTFISQKNKTQLLSNLPLTQLNQDQLQTNTNTFPQFSISNFNRSRPIVKVQDGCSHSCTYCIIPSTRGKPKSRSPKECLIEIQQLLNAGFREIILSGINLRQYTATQQGCKDFWELYSFLDKKLSPTWKGIARLRISSLDPAQLTQRGLDILSNSHMGCQQLHLSIQSGSAEILKKMHRSHYTPQYLLDTTKKLSTIWHKFGLGADFIIGFPGETEKHFQETVDLIKELPLTYGHIFPFSARPNTIAATLPNHIKKSESQQRAATIRQLITQKEKIFHKQLLTMSTLHIAPEGGGKTGGVDEYYTHCHLTEPVETRQLLKVKPLSLTKKGLLVEILPPH

SEQ ID NO: 400 - protein, 367 aa, Lawsonia intracellularis
MAALNNKRAEQTGQRMDMRDVLDLVALGTLADMAMLSGQNRILVKNGLLKIAEAKRPGIAALKTVSGFTPLTHLGAGQVTFHLAPRINAAGRLGSPRIAHEMLYTTSKDFAIEHATLLNKINEERRSEEEYIFNAALEQAQLENQRQGLVLHGSDWHQGVLGIVASRITEAVHKPVLILCTDGKMLKGSGRSIADFDLYHGLSQCADLFERFGGHKQAAGLTLPINHLHILKERFDTVVRNFFGDTPITPILHIDMELPFQKATNFNFLKSLELLQPFGIGNPEPIFSSLPLRIQRCNTFGKHKEHINMLVVEEISGISLQAKGWRLAKNISSSLQNSRIQLAYTPSLNFYNGISSIELEIKDWVEL

SEQ ID NO: 401 - protein, 331 aa, Lawsonia intracellularis
MELTGTQKAAVLLLVLGDKFTAEVFKRMERREIAAISKAVIDLDTVSKDTVEDVLRTFHQDLVTGKDLIIGGQDSLKRMLMKNLDGETAKYIMDSLNVESGPAPFKELEKVSPKLLSQMLRNEHPQTLALILGHLSPEQAASLLIMLPAGVRAEVLIRLAKLESVPEDMLVEVDRVLQSQLIAMGSKEGKKVGGVQSVAEILNAVDRATEEEVLAEIEEDSAQMAEDIRNLMFVFEDIKGLDDRSIREVLKETSNEELTLALRGASDELKEYIFRNMSERGANMVREELEFMGPTKLSDVEQAQQNIVKIVRRLEGEGKVTINHGSGDVSL

SEQ ID NO: 402 - protein, 513 aa, Lawsonia intracellularis
MFWINRTDYKVLYSNLGPEDANHIIKTLQADKVSYQLADNGKTILVPASSVYDLRIKIAGEGGMVGSGIGFEIFDAVNVGQTDFVQRINYQRALQGELSRTISEFPNVESARVHLVIPQRSLFIEEQQKPSASVVLKLKNPSRKMDQKEVQGMVNMLVMAVEGLDKEHVSITDSLGKPLYFPNEDNLAGLSVTQREYKLKVEQGLERRIDELLIPLMGQGKVIAKVNVDLDFNQKTIRREIYDPNSSVIRSEQRSEETNRGQSNLESGSPDVNFRGDGPNGAMSTQEGTRETRTTNYEINREEQNIVGEVGQINRMTVAVVVDGTYVKEPNGEYKFVPRSQEELNRIRLLVSHAIGFDRARGDTIEVSSIPFDEADLPIEPPAAEVIAKYAERLGKPLLNALLAFLFLMLVVRPVILALIRPKVESEAIVEGLEGLPSAEEQLALYETQEEAAKAAAMEAVRIASEEEEEFESLKHLEDIKNYTLQLAENNIEQSILVLRGWMKDDTKTAISS

SEQ ID NO: 403 - protein, 608 aa, Lawsonia intracellularis
MNRENEEFNLYHRTLGNTEQHSEEETPCTVVDIKGVSISADVYEDYIKKHSLVVIDEANKSINDYCPCCKTCCKNKQTYAVAAAQGGCCGAISIAVGYGVGKLIELCTPTVAPTEMIFTVPTPLATAMTSGHTLTTVASSIEGITQTTAITMGCCGLTCCLLGSIFGYLTNKVEEKNERIHTAQQRLEYMVLNRQFLSDEDEGYELVDFSHRQQVVTNQPQRINSPVNNNSEQGEGSSRRSSEGTVYEEIFFLPGYNRGGQISSLLSMQYILAGPSAQVSSTLKMLALKAHRIPSDAAASLQLGKKSQKLQGPNRVLKADLQFQNNPQGISICRMFAFTDKYECNLEKKIRSGRAGLVAELFPGMTAGLAYTRHNEGRKSFEGIQLGTGSGSVTSKTESEALSAVIALNSEGGGVTGHIASYHGWGKMKTSRSFIHAGSKISAKGKPNIYLNGGLIQVGYNISLSKTTILTPYIEGMMSMVNWDAYTERSGLLPCKISRSEEYVAERSVGLCHHWKPTSGFQIQSWIACISGERRTDGVSCRPLVMPIKKYESYISVQERKYVHIEFGASYSMSVTDTLQLGIDGMIHLDKVHKIKEKSMSLSLMYLH

SEQ ID NO: 404 - protein, 331 aa, Lawsonia intracellularis
MIVFLLFQNCIFSHQIYSLSSFYLFFCHIIKSKRCHVVFTFFVLFLHMLSSNVFSMNRDGSVSSNSSENIPLYVRFYGDPDLLRGRTSRPPDTVDAIQYGPMEDCSICYQSTFCGFFGGMAIGSIVGSSVGAVGGGVAGASAGCVLGAGVGSTIGAAYGCMMGASTARDSECSARAENNIAAVVTQQPKPLFKEVYDQSRMNGRSVTSSTSSLTEVSSLKSTCSSSSSSISSDTSSNSSFQKYLKLCFVSSSSSSEEEIEEEEEEVWIPRGECLLSESECHGKSESHNPQGSDKGTAGNKQDSSGNSQSYYYSNNFNKIIHIYSIVTITRH

SEQ ID NO: 405 - protein, 792 aa, Lawsonia intracellularis
MNEYCTITLLSPPYSLLTYTLPSWLPYTLWKPGLRVAILLGKEMLRTGIILSLHTQKPELPHNVVLRPILWALEKIPIFSYEYIKMIQELALRHSIPSGKIFASILPMGLRTTHVQMKCTYKNVLTNLQLKELKHKTEEELHDIGTKWISEENNDWLTSQTESMIVSEECILTVDPPWPIRPSATRQRVILDFLFTNGVVSKKELLQKLGKEYRTALTSLTRYGIISIKQEILTDKDELANTIALLPPLIPFGYTLTEEQKEVVTLLKKELQKNQAKTFLLFGITGSGKTAIYLEIIQECIRNNQSVLVLAPEVALALKLQHEIKTVFPIIPCYLSHGYQSSQQKEDLFRKIVKNQVAKVIIGTRSALFLPLTNIGSIILDEEHDASFKQGERLIYHAKEIAWFRAVQSNALLLLGSATPDIKTFHAVENNKISIVKLHSRVGGGVLPTIKLIDSQQLESKDVTFARESLTTLKETLEVGEQAVILLNRRGYAPIIYCITCRKSIRCPSCDVGMSYHKIQESLICHYCGKSIRFPCPCPFCKGTQFLPMGQGTEKVEEEIRAILPSDSMVLRLDYDTTRRPGRTEEILKTFAQGKSQVLIGTQMLSKGHHFPNVTLVIVVNADIGLNIPDYRAAEKTFQLLTQSAGRAGRGEKAGQVLIQTHDTSHYCWKFIQQHDYLGFYKYEIALRQKWLYPPFINLALIRLSYPIEWKEGKIWIKKVQSLLQEWANKLNVSVRGPALSPIPILRGRNRFQCLLKSNNWQHIRTIFYKIQTTALPQKLRVVLDIDPIDML

SEQ ID NO: 406 - protein, 432 aa, Lawsonia intracellularis
MTPEVALRLGLAAGTYYRRKSHRSRVVIGKDTRISGYIFENALTAGLLASGMDVFLVGPLPTPAVSFLTANMRADFGVVISASHNPFYDNGIKLFDADGFKIPDKAEHKISEMILDQSHTWDYPDPSSVGRAHKIKDALGRYIVYLKNTFPSTLSLEGLRIVLDCANGANYKVAPLALEELGAELIKIGTDPNGLNINHQCGSLFPEYVAKKVIEMRADIGLALDGDADRLIVVDEKGIILNGDQIMALCAQDLMRQNKLPGNILVATVMSNMALEVFMKEKKGALIRSNVGDRYVMEAMRKHGAMFGGEQSGHLIFREYSNTGDGLLAALQILRIMKQYERPLSSLAGLLQLFPQRLINVNVKQKRPIETMPTLLKTIQRIETAFSGRGRVLLRYSGTEPLCRVMVEGESDSKVNTYAEELADIVAKSLAE

SEQ ID NO: 407 - protein, 311 aa, Lawsonia intracellularis
MFLTTSDHRGNWKYFLIAFATALILWYTFNAKEQVERIMDVRLDYKGLPSDLIVTEGQLNKINVRLRGSLEMLRLFSGRELSYTINLSGVTQGVNTIPLSSIQFPELRAYQIIDVIPPRMVLQVDHVKEVELPVTLQLRSSLFSDAAYLEDVHIIPSHVKVRGASNIVSSMNTVIAEVSALLDDEGRVVQDDAPLIAPQFVEVSPPTVNVCFKLGMQRRSISLQRTVLLPEEKERLTTRPERVTIVVSVPQSLLNDPKYISQVHASVDTSILEDSLGKDFDGVKRPIKVFLPAAARLIKVSPDIVTVFRRK

SEQ ID NO: 408 - protein, 749 aa, Lawsonia intracellularis
MKDEQKEEKDKIIYTSTMKEKKRRHRLYEFLLAFALILLILGGTWTQLAFYGVDSWIFIVLLNINSIFMLIVLFLVTRSIVKLIMERRRKVFGAQLRTRLVLIFVSLSLIPTVIMFLASNKVVATSVDYWFTKKAESSLQAALDVGQSFYVAAAQRLRTHSESILTTIKKDKLIWGGSGIDTLLQDKQQEYGLTFIGIINPQGIEQHWYGQEGTLSIWKKIRERIDWNHVASNNFSSLLWATDHADYVFGVLAIDNGRSGYLITAESIGQGLLTKLDRISNGFEEYTSLKQLKKPLKISFLLILGILSMIIIFGSVWFGFRLSKEITAPILALADGTTRIAQGELDVRLIDEGQDELGLLIKSFNRMAKDLQQGQTNLKKANELLAEQKDTLEERNKYIETVLDNITTGVITLDVFGYILIANKAACSIFNTSQHFLKGRCPANFLPPQYKNIFYSMINQLQKHPDLHWKTQENFILGDRQWKLVIHAVAITGIDGIQAYVVVIEDITELEKMQRMAAWREVARRIAHEIKNPLTPIKLSGQRLDKKFGSQIQDPVFQQCTELIVKQVERLQDMVQEFSSFAKLPEVKLSSGDIRPVITELLELFIHNHNEIKWNVYIPNTLPEILMDASALHRALLNVITNAVEALEYSQNIEKKCIEITITHDHTKGIISIKIEDSGIGLAPNERERIFDPYFSRKKGGTGLGLAIVKAIIDDHKGTIKVFGSYLGGLNIEIELPIVTSHVDFTQSI

SEQ ID NO: 409 - protein, 502 aa, Lawsonia intracellularis
MATARKAVVKKMPVGHGTKRGSMGNRTQKSSMSNGVVRHELLDDVFAEDDLSQTLPKYQMPLYEHRPRDIYQAVHDELMLDGNARQNLATFCQTWVDPEIHKLMDECVAKNMIDKDEYPQTAELEMRCVNMLADLWNSPDPTNTIGCSAIGSSEAAMLGGMALKWRWRAQRKKAGKSTDKPNLVCGPVQICWHKFARYWDIELREIPMEKNRLIMSPEEAIKRCDENTIGVVPTLGVTYTGQYEPVEEVSNALDALQKKKGWDIPIHVDAASGGFLAPFIEPELVWDFRLPRVKSINSSGHKFGLAPLGMGWVVWREKTDLPEDLIFWVNYLGSNIPTFAINFSRPGGQIVCQYYNLLRLGREGYRRIHQACYDTTDYLANELTKTGIFKILYGGKTGIPALTWTLKDEKKYPFSLYDLSDRLRTRGWQVPAYSMPANRTDLVVMRVLVRHGFDHDLADLLVNDIHRAIEHLKQNPRRKPLGSGQVTSYDHSGRSSIPQKKK

SEQ ID NO: 410 - protein, 509 aa, Lawsonia intracellularis
MSYSSFGVLEKLRQELFHKIIRLPLSFYETSQTGSLMSYVINDVGMIRQSLPAIIQAVRQFLTIGGLLYVVFTQNFSLACWALIVLPIAAFPFVMFSVALRRYGRRSAEIIAKTSSLLQELLSGIRTIKAFATEKEEIERFDIENSYISKLSLRQSTISELSSPVMELIGSIGVAIAIWYGGTEVLEDKMTPGTFFSFVAALIMLYEPVKALSNANMSLQNALAGAERIFSILDDSKLHIETGGSVLCGKEFYELTFDHVTLRYDSVSEPALNDVSLTVRTGEKIALVGPSGAGKSTFVSLIPRFYNPQAGSIFFNGRLLTEYDLVSLRQAMAIVSQEPFLFNMSIRDNIAYGQPLEVRDNIIKIQAAAVAAFADEFIDLLPDGYNTKVGERGVKLSGGQKQRITIARALLKDPSLLILDEATSSLDSESERMVQGALENLMRNRTSLIIAHRLSTILESDRIIVFEDGKIVSSGKHKELLGSCELYTRLYMMQFRTGEFQDAPIEKGC

SEQ ID NO: 411 - protein, 316 aa, Lawsonia intracellularis
MSQTGILLESGTNELEIVEFFLDEDDDNGEVYRGYYGVNVAKVLEIIRMPKVTELPDTQDESILGAFNLRSHVIPLVDLGHWLGKKLAKTDEPKKVIVTEFNDVTTSFMVSGVNRIHRISWDEVEPPNDYVSQVSKTTITGIITIEDRIVFILDLEKIVAELNPALSLRLDEAVTWGSEIRYRALIADDSNLIREMLKDLMQKANFEVEAVNNGREAWERLTELKNRATEENKNITDYVQAVITDIEMPSMDGLNLCKRIKEDPQLRKLPVVLFSSIITDKLRHKGIDVGADDQISKPEVTHLAKRVYALIAERQS

SEQ ID NO: 412 - protein, 334 aa, Lawsonia intracellularis
MSSPLIIVNKSTVPVGTADKIRILVKEALKTRGIELSFDVVSNPEFLKEGDAIADFMKPDRIIVGTDSESSAHLLHKLYAPFARNREKLIVMSVRSAELTKYAANCMLATKISFINEMALLCEKLGADIREVRKGIGADHRIGYHFIYPGVGYGGSCFPKDIKALIHTANQIGIDSKLLEAVEVVNDRQKHSMAVKIQEYFSGQSGIKGKTLALWGLAFKANTDDVRESPAIAIINNLTAGGMYIRAFDPVAYDTAKAVLHDNMLVSIEADPYTICNNSDALLIVTEWNQFRNPDFEKIKTLLNMPVIFDGRNLYSPSFMRQCGFTYYCIGYGK

SEQ ID NO: 413 - protein, 305 aa, Lawsonia intracellularis
MIYSHLSSTSCTITTGCKVNLNLYITGILPNGWHKIDSIFLPLSEPHDELHIEITNHNQGLHLSCNILDIELENNILTKTYTLFTKATHFTPSISIYLKKGIPYGAGLGGGSSDAAALLTWLQKNSPLPLSPSKLLKLAAEIGADVPFFLKNKPCRATGIGEKLEEISLSNLNISGNTLFIICPNLKISTPYAYKMWDDYNKKQIATSSRYNNNLTKKYSWDRSSPSTHLSDYLWMKNDFEPVIFSEYTELSVFKEQLLQFGARAAVLSGSGSSIYGLFKEYNQTSIMTEFYKKKNILTFSQLLQ

SEQ ID NO: 414 - protein, 321 aa, Lawsonia intracellularis
MAIKPKAFSFMYGELKILSGTANLPLAHAICNNLGCPLTPSLCETFSDGETRIEINSSVRGGDVFVIQPTCDPVNYNLMQLCLMLDALKRASATRITAVIPYYGYARQDRKVNPRAPISAKLVADFLSTAGANRIVTVDLHAGQIQGFFNCPVDNLFASKALLEPFFSMKDEIVVVSPDAGGVERARAFAKKIEAPLAIIDKRRDNPNQAIATSVIGDVKNRIAILVDDIIDTAGTITAAAELLLRAGAREVNATATHGVLSGPAIENLNRSVFTKVLVTDTIPIQDKNKECSKIHVISVAGLLATAIYNIHNSSSVSVLF

SEQ ID NO: 415 - protein, 379 aa, Lawsonia intracellularis
MLSSIIRPTKNCLLHFIIRSSYLTLLFIAVFHNPAQSVRIKDIATFSGVRNNQLIGYGLVIGLAGTGDKRDSPFTASSMTNMLERMGVAVDANKIKPKNVAAVMVTANMPVSARPGTELDVTVSSVGDAKSLQGGVLLQTPLKGVDGKVYALAQGSLIIGGYSAEGTAASVQKNSTTVGSIPGGGIVEKGIPFDFNTQQNLTLNMNSNDFSTTMQVVNRLNATMGGNFASAIDAGTVRIDIPPAYKGNLVPLIASIENLEINPESVAKVVVDEKTGTIVLGREVRLSRVAVAHGNLQVVIQESAQVSQPGPFSQGQTVITPETNLTLQEETKRLNLLEGASLQELVDGLNAIGATPRDMISILRALKAAGSLHAQLEVL

SEQ ID NO: 416 - protein, 325 aa, Lawsonia intracellularis
MIHQGFIFCICPDSTILQQQLEELVTAQYVSNKWEKSVYWGDEELPKKFWDNLTLQNLFTNKQIVVLRNAHLLPVDIWKNISSIISKPNQYLWLIFCLEAPWEKRQPKLPAHIQKLPCFIFAQKQKWIWSSPGVDERNLKQFIKTQATSIGLTFEPHTLETLSNLLPTDAATIKSELLKIKLSHSDSLPISTQQLNVISHTANTFDIFIFLKQLESGNALQVWTSILHEQQKEEDPLFFILTMLQREAKTLWQLLMGETVTGYPNELSKKTQLAKYIGIKGITKMWDALYFAEVTVKSGEGSSIQALETLISTLLPLFTKAQETS

SEQ ID NO: 417 - protein, 368 aa, Lawsonia intracellularis
MQNKVIVIDYGSQFTQLIARRIRELGVYSEVYPCTVSKEVLASLQPSAIILSGGPASVGASDAPQLDDIIFDFNVPILGICYGMQLIAQCFGGILAYSQTREYGPAEFILEGNSILWDGISHKPFSRVWMSHGDTVEFPPPNFTVIGRTNTLNVGAIANEEKKVYAVQFHPEVSHSEDGEQIIRNFLFKIVGIAPDWTMSSFIEKIITQAQKTIGDGNVVCALSGGVDSTVVALILNQAIGKRLHCIFVDNGLLREGEKDEVISYLREHFDLNLIFVQAQDRFLKQLEGIQDPEEKRKIIGHTFIDVFDEEARAIGKVDFLAQGTLYSDIIESIPHRGSSVVIKSHHNVGGLPETNVFETYRTFKRTI

SEQ ID NO: 418 - protein, 384 aa, Lawsonia intracellularis
MIPLLQRQIFRESTYIFFLVVGALLTLIIINRAIQMRDLFIGLKLEILDVLILFSYMVPLFLILVIPIACMLGVFLTFLRMNLDKELIALKASGISIYQMLPAPLAFSFFCTLLTLWISLFWIAWGMEQFKTTLLDIARTKVKISIQPGVFNNNFPGFVLFARQVDPLSGELHQILLEDRSQKDRHLVILAPTGTIETNPTKGELIFNLTNGNIYTMSLNKTSFLSFDQYLVRIPLTTLLKNINFNELRPKEMSWERLIKEYNITNTMQYQNKISVELHKRWAYPAACIALTIFALPLAIMFEGIHRQFGLILALIMFFIYYGLMSFGFSTGESGTIPPAIGLWLPNILFFLLGLYGIYLTSREKTANIVYLIPNILRKIKGIR

SEQ ID NO: 419 - protein, 674 aa, Lawsonia intracellularis
MPATPPYYPFIPLVELLGEILGVGSMSKRVLDKYGQLIHRFGTEFNILHVVSERDLRQYWNELGEAIVRMRRGQVIRQGGYDGEYGIIRVFSDAERASFLPGKMFSRSSKPRVTTQEKSKTIKNLSPKYMTMPLLAATGVLLEGEKETSSPKSSSVTAASYGDIFLTKKDHDKKIITTTSSSSNFSYSTSQNEAIKADIQPILVLAGPGAGKTRTLIGRIEHLLFSGIKPSEILAVTFSRRAAEELQERIRNSIGKGTIRVDTLHALALGYWPKKEDGSQPHVLSEEASQAVFIKANEENEPKLIKKAWEILNLVREKQVDTSVLPEQAYLPMLEKYRQYKKIRNMVDYSDLLEQWISTLQKSRGTFWKAVLVDEIQDLSSLQLALVKLLVPSSGKGFFGIGDPDQSIYGFRGAHPNVQLALSKMWPGIKVITLAENYRSVKEVVYSASALLASGKQSKNLTSTRKDKGLLHLFTAPDYCREASWVASKVSQLIGGSSHTLVDARAGNEPHPLAGLCSPGDIAILVRMKALMKPFQESLVRLGVPCSVPETELFWEDQRVALLLGLAGRKFGRPFGIQTVPDPSSIATHIWNGGPSALLSWLESVPPFDPLFRESSSFKKLLKAYKVHGSWESLLNWLCLRQEIDLVKSHSEQVQIMTLHASKGLEFKVIFLPA

SEQ ID NO: 420 - protein, 810 aa, Lawsonia intracellularis
MSLIQTGLQSPSEVIKSLDNTMNELFKPKGSTQPIAEHLHDWEEINKQLIEAEKEAANYDNYALELKKITLNLESLHSKSKELEQQQYHLKKRLDIWHQWEEWRLIQTRLEHLPPISASFPQDGAARMERALEKKEHAAREVTLARTRLNNTLNKIQQCHINHDILCIHKELQTIAEHKSTYKTALIDIPALEAKLQQTKESLNQELLILGKNWSIEKINKIDRSISVREKLERLSVEIELTKEAYDAAATAYNNICEELEVAKQEEIEKQKIYESLPSLQTVLSDTNKDILSRMLIQIEEAERYLPEKKSRYNSLYEDFKNLLTQFHLHPKYNKIETLLKLLNEQNSAIEMVNTIQEKALEEIQANNLLTQTKQKVDQLKLHSKQIEEQIQQLGDVDTKDIVSIYSQINTLRTLLHIFSTEKIRAEEIEDYYQLQVANNNFNNKSSRSIVIGILSSLIGCGIFSIQHLMNSNILPISQNIIILLPLWSGYFFLSSGIVIILKKLFYNYLPLTKNSTITKQLHTRHEKALSKCTELQNKIYTICNELRIETPSLENIEKLNYQIEQKKELYDKKEHLKQEHNKYQKEIESLYQQIDVAKKEHEQKLADVILAKNTWYEYVLEFGIQFVPKPEQVTAFFARVETACNLWSTIELLNNDIAELESYYKNFKNFVNQTLGEYLSSIDCDSIPALINAVKDILTSHQDDELNNSYTQALEDLQLAQAHTKYLIDYLQKLKIQYEHSKTKYDKTCSAWSNNLSNLMLDPNLAPDAIKNMFKQMDHIALLNQEMIKIQNKLEHQQTKKMLLFSHLY

SEQ ID NO: 421 - protein, 345 aa, Lawsonia intracellularis
MQPIIVSSNEAGQKLFQFLTRRLTVPKSILHRWIRTGQTRINGKRVTPFTIVNFKDKIRIPPFAYEYKKKDLTTSLIHNQYDISPISSHTTSPLPPVIAHSPEFIIFYKPAGLAVHGGTGQTDSLAHRLSQHYAHSTFMPTPVHRLDKDTSGLLLVAKTYNSLRYFSELFASHSTQLTKEYLAWVVGICPWTQPICLEDILTKKQKQDNYSRLNSYQNKLQQTSAQKASLTVRCIKQYKDKSLLLIKLHTGRTHQIRIQLSIHGFPIIGDKKYGNTIRSHNLKLHAFRLSFPGYTFTILPSWDDKWQVTQEDIPNIALLNQEMIKIQNKLEHQQTKKMLLFSHLY

SEQ ID NO: 422 - protein, 484 aa, Lawsonia intracellularis
MKDLLMPIQENIRNFSIIAHIDHGKSTLADRILEYTNLVSDREKRDQYLDKMELERERGITIKAQTVRIPYITADGKTYILNLIDTPGHVDFNYEVSRSLSACEGSLLVIDTTQGVEAQTLANVYLALEHNHEVIPILNKIDLPSADIEKVKAEIEETIGLDCSTAISISAKTGLGVDSVLEAIVQQLPAPKGDPNNPLKALIFDSWYDAYQGVVVLFRIMDGTIKKNDIIKLFSTEKSYEITRLGVFSPEAIDIPQLSAGEVGFLCGNIKTLGDAKVGDTITLLHNPCTKAIPGFKEIQPVVFCGLYPSESSDYDILKAALEKLQLNDAAFSWEPETSQALGFGFRCGFLGLLHMEIIQERLEREFQVELIATAPSVIYKVETTDGKIQEIDNPSKLPELGKIVHLYEPYVHIDIHVPSEFVGNVLKLCEEKRGIQKNIAYPAQQRVIITYELPFSEIVFDFFDRLKSATKGYASMDYEVIDY

SEQ ID NO: 423 - protein, 415 aa, Lawsonia intracellularis
MRRCMLHIFIPIMGRYLVRWRYLSIIICFLGIVGCSNSLMESMSSNGLSYTNLRPFYNIKEQQSATAIAKTFSPRKQNLRSWKELRPALEATHQYLSKKDLEQVAIAHGDIAITWGQLFNTVNRLETLLDQLDEHPEVLSKDFQWIGLTEDINFLGYYEPMFKASYKPSKEYRYPLYKTPPDLHQLNLGLFKKELVGSHIIYRQTEKGPIPYYSRYEIDDKGVLKGKGLEVAWLKDPLDSYFLHIQGSGLLVFEDGSSIHIGFAGSNGQEYHSLASYLETQGIIPQGNKNIELIRNWIQENPLRMSELLYKNNRYVFFKLYKDGPIGSSGYILSPWISMSVDRSVFPLGAIIAFDLSNNASTNEFTKETCGIGIAQDSGGVKGKKIDIFCGSGQQAYQESISLSGMGNAWILLAK

SEQ ID NO: 424 - protein, 494 aa, Lawsonia intracellularis
MGNNNNDNGISVNSLPFRDGKSAEPHYSNTIPQSKYKISQRPTPPGVEPMTSGSFKTPDNTTEKIKAMDSVRVNGHDMAITTNLGVKIANNQNTLRAGVRGPSLLEDFHLHEKLAHFHRERIPERVVHARGSGAYGYFQVYKSMRQYTKAAFLQDPGVKTPVFVRFSTVQGFRGSPDTARDLRGWATKFYTQEGNFDLVGNNTAVFFIQDAIKFPDFVHAVKPEPHNEVPQGQSAHDNFWDYVSLQPETLHNVMWAMSDRGIPRSYRMMEGFGIHTFRLINEQDKSCFVRFHWKPVYGTSSLLWDEAQILTGRDPDFHRKDLWQAVEAGDYPEYELGLQIIPEEDEHKFDFDILDATKLIPEALVPIELVGKMVLNRNPDNFLQRLNKLHSVLLILYLGLIFQMIHSYKAVFFLISLPSSVLILPICGAKNCGYTPSLCNILLIVSIDSLLTPSATSSATRLDFIFCLFLAYKLSDGSLVNPFTGLGRSYDNCS

SEQ ID NO: 425 - protein, 586 aa, Lawsonia intracellularis
MKIRITSCKNLCFIPKKRTSTIHWLPMKTNKTTFILLINKSKCMYAKPFHRERIPERVVHARGSGAYGYFQVYKSMRQYTKAAFLQDPGVKTPVFVRFSTVQGFRGSPDTARDLRGWATKFYTQEGNFDLVGNNTAVFFIQDAIKFPDFVHAVKPEPHNEVPQGQSAHDNFWDYVSLQPETLHNVMWAMSDRGIPRSYRMMEGFGIHTFRLINEQDKSCFVRFHWKPVYGTSSLLWDEAQILTGRDPDFHRKDLWQAIEAGDYPEYELGLQIIPEEDEHKFDFDILDATKLIPEALVPIELVGKMVLNRNPDNFFAETEQAAFCPANIVPGIDFSDDPLLQGRIFSYFDTQLHRLGGPNFNEIPINRPICPVTNQQRDGNHRMQIDSTVANYEPNTVSGNWPREVQPSEHGGGFTTYKSKVEGTKVRERSPSFFDYYSQPRLFWLSQTAPEQKHIIDAFSFELSKVMRPYIRERIVDLLSYIDRDLAKGVATNLGLTLSQEQLSYDLPKPVNGLTSDPSLSLYAKNKQNIKSRRVALLVADGVSKESIETISNMLHKEGVYPQFFAPHMGSIKTEEGNEIRKNTAL

SEQ ID NO: 426 - protein, 471 aa, Lawsonia intracellularis
MYNSLRNSFTMEGFGIHTFRLINEQDKSCFVRFHWKPVYGTSSLLWDEAQILTGRDPDFHRKDLWQAIEAGDYPEYELGLQIIPEEDEHKFDFDILDATKLIPEALVPIELVGKMVLNRNPDNFLAETEQAAFCPEDLVYIFCLSIGVLLICLRLKVPAIVGFLLTGVLCGPSALGLVENVHAVELLSEIGVVLLLFTIGMELSGEELARLKKPVFVGGTIQVVLTTGVMCGIAMLFGRTFPQSILIGYLATLSSTAIVLSILQQRGESEAPHGRLALSVLIFQDLAIVPMMLSIPLLAGQGEADPISFLLSAGRLVLILGGGWFLAYRVVPVLMRQVMRTRSRELFLMTSLGFCLAVAVGTAYLGLSLALGAFLAGLLLAESEYSMSVVEGILPFKDVFTSLFFIAVGMLLDVHFFIDHIGSVIALAVILITIKVLLAISCNDFSWLSIKSCYNGGNEFGTNWRVFFCSC

SEQ ID NO: 427 - protein, 439 aa, Lawsonia intracellularis
MALVTKEEVLQYHSEPRPGKLEVFPIKPCKTQKDLSMAYSPGVAEACLAISEDKDTSFLYTDKANLVGIISNGSAVLGLGNIGPEAAKPVMEGKAILFKQFADIDCYDIEIKATEIDHICEVIKALEPTFGAINLEDIKSPECFAIEERLKNEMNIPIFHDDQHGTAIISSAALLNALEIANKKIEDIRMVISGAGAAAIGCGRLFKILGVTPENIAMFDSEGHINVSRTNLNQEKKEFATQKTYTTISEAIDGADCFIGCSVPGVITERMVETMAKTPIIFACANPVPEIGYNEVKSIRPDAIMATGRSDFPNQVNNVLGFPFIFRGAIDTYATTINTEMKIAAAYAIAALAKESVPESICMAYNVKNLKFGPDYIIPKALDLRLLEWVAPAVAQAAIASGVARKELDIANYALTLHKRLSAAHKRQELLLNSYGFYS

SEQ ID NO: 428 - protein, 498 aa, Lawsonia intracellularis
MTILQTEPKQKNLQKNSKKNTQSNSSSLNVKNKNDSSVNHVSHDLLRRVPPHNVEAEQAVLGGIFLRNTVFHTLIDIVRAEDFYIPSHQILYTTFCELYRKSAPIDLVSVAAFLNDQGLLEQVGGASYLAELAQTVVSGANAEYYATIVRDKSLHRTLINACSTIITNCFDPSCNVDSLLDESEQTIFSISERTVGKAFKSSKDLISNVFQELEKRFERKEQVTGITTGYNRLDKLTAGLQPSDLIIVAARPSMGKTAFSLNMAMRSAIQQGTPVAIYSLEMSMNQLMMRMLCAWGKVDLSHLRHGYLNSDEWSRLYHAADVLGQAPIFIDDTPALSPLELRARTRRLKIESDVGLVVIDYLQLMRGNKRTDSREQEISEISRSLKSLAKEINIPVVALSQLNRKLEDRTDKRPQLSDLRESGAIEQDADVIMFIYRDEVYHKQQDNAKKGTAEIIIGKQRNGPIGTATLAYLANYTAFEDLEPGLSASPSETYSNIA

SEQ ID NO: 429 - protein, 425 aa, Lawsonia intracellularis
MVLREEIEEQKARETQRITDEIERKMEFVRRFGAKATKARQASSRQKMAKKLEQELEEYKPEIKRKELKFIWPTPLKADKVILSAAALSFSFPDGRQLWPSLTFSLLNGQRIALVGPNGCGKSTLLKIIAGQLKSTGGSLTLGSGVRLGYYSQHQTEILNTSGTVLGEIRRLSDPKMTEEELMSVLGLFLLGQGYFDRTIQMLSGGEKARLVLASLFLNKANFLVLDEPTNHLDLESREALVNALSNFSGTLLVVAHDRYLCSNVTDEAWALSSEGLTRYEQGFLQYDEARKQGLKQVTIVETQDNQKNCLTQKNKKNSVISYSRDELKSLKREQAKKRNELYNTIKPKQIAYKRLEEELSILLEKQHNLEQLLATPAGHGSGIETAKLLKQFSEVKDQTDRIIDKLEKLELEINALEQQRIAIS

SEQ ID NO: 430 - protein, 319 aa, Lawsonia intracellularis
MATQERGLGRGLDILFGNTSPEVEQDHIKKHSKDGLVLPSITKLPIAILRPSSSQPRKSFDKNALEELVLSIKNQGVVQPILVRPYREQSSIRYEIVAGERRWRAAKLAGLVDVPVYIKELNDEDVLTIALIENLQREDLNPIEEALAIESLRKKLSLSQDELAHRLGRSRSAIANTLRLLHLTPEVQEGLCNHTISSGHARALLALSDMELQQVLYKAICCNQLSVRDVETSVTYWKKNGVLPPSISGITKDTVKVKQKERSERLKNVVNTLRFNLHPKVTISGSECMGRITIPYDSQEQFTTILLKLGINASDTIDT

SEQ ID NO: 431 - protein, 565 aa, Lawsonia intracellularis
MDRMDLERERGITIAAKNCAVTWQGIKINIIDTPGHADFGGEVERALSMADGAILLVDAAEGPLPQTRFVLKKTLEAGLKIIVIINKIDRKDARVQEVLNEIYDLFIDLDATDEQLEFPVLYAIGRNGVAMRTLDDAQEDLVPLFETIIEVVPGPKYDPNEPFQMLVSDLSYSDYLGRLSVGKISHGSVHSKDALVCMNEEGVAIPLRVTKLQSYQGITLTDIESAEPGDIIVIAGLEDVSIGDTICTKNEIRVLPRLNIDEPTVAMRFTINNSPLVGKEGKIVQSRKIRERLFKETLTNLAISVEEAEERDSFIVKGRGEFQLAILIETMRREGFELSVGRPEVILQEKDGERLEPVEHLYIDCDESFMGVVTEKIAQRKGRMLNCVNNGSGRVRLEFSIPSRGLIGYRDEFLTDTKGTGIMNSLLSGYEPWRGDFLVVVTGSIVSDRAGSAVAYALFNLEPRGELFIVSGDPVYEGMIIGEHNRDNDIDVNPIKEKKLTNLRTSSKDEAIILTPVKPMTLEKALHFVKEDELVEVTPISIRLRKAELSAQKRHQIAGKKKTGK

SEQ ID NO: 432 - protein, 629 aa, Lawsonia intracellularis
MLAVLFFGLLLLYLYRWMNKNVLTDPKLYTPGAGSKKKSKPKLGLIESTKCILTSRYLLMISALVIGYGISINLVEGVWKGQIKLLYPDPNDFNVLMGKLALTTGFVTIIIMLIGANILRRFSWRTAALITPIFLMATSVIFFGVIIYENKMGLDATLWGFGVLLLAVVVGLMQNAFSKGVKYSLFDATKQMAYIPLDPELKVKGQAAVEILAGRLGKSGGAAIQSIMLLIIGGNVTLASQVEFLGSAVLVVVAFWIISVFGLSKQFETLQSEQQAEEANSKENKEVKDGEHKESSLKQVIGTHEQEVWNRRTVSEYMTRVRERATIHVQAMLDKARANAETIRKTAKQWAEKTKKESDKLHKQAQQALKEAERIREEADHIRELAHEEGYRLGIEQAQEEIKEQIKSIHMTAASILKTIERQYTVIFDNWRSDLVKLLHTATEVATDWILSKEHTAILDSVLNKAVQQLEERQRVTIRVNPNNKNTIIDLITNIKNQFPELKNWEIKIDVTMGENDVIVESRSGMVDSNSQLRKEEVRAILQQLIIPESEIDIVAAQSIADIADITGITALSKEAAILQHTPVQNDSSEKTPSSKETLSPNDKKPISPAEIDLINPPSEEVEFSQKFV

SEQ ID NO: 433 - protein, 316 aa, Lawsonia intracellularis
MKRILNTSFRPHGKKDIFFCEDPFIMKGDKVVVELEQGISLTQVVDILQSLPNSIDPLTVPSIIRKATQKDLEQVNKNKEFSKNAFAFCKSCIHEHQLPMKLVDVEITLDQSKYIFYFTAPNRIDFRDLIKDLIREYHAKIELRQIGERHETQLTGAIGNCGRVCCCRRFLKDFSPVSIKMAKEQNVFLNPSKISGSCGKLLCCLSYEQENYQIFNKQSPKIGKRYQTDQGSLKVIRTNLFKNTITVLNMSNEEIEYTLEEWDKLHPTHTTPQTIKQNIPHQNKTSHPSSDFLTLLSDHDTNKIDDNSLDTILTES

SEQ ID NO: 434 - protein, 341 aa, Lawsonia intracellularis
  misc_feature (69)..(69): Xaa can be any naturally occurring amino acid
  misc_feature (121)..(121): Xaa can be any naturally occurring amino acid
MSETAGKGVTMPEIMQSSYPDETLYREKDDSIRPSRLDDFIGQEELRENLKVFLNAARDRGQAMDHTLXYGNPGLGKTTLAQIIAAELGVNLICTSGPVLERSGDLAAILTNLSKHDILFXDEIHRMPITVEEILYPALEDYKLDLVIGQGPAARTVKIELEPFTLVGATTRIGLISSPLRDRFGIISRLEFYTPEELSQIILRTSRILNVPITKKGAIEIGRRSRGTPRIANRLLRRVRDFAAVFGSATVDEELVNHALQKLDVDEKGLDQMDRKLLTVLIELFAGGPVGIKTLAVACSEEVRTIEDIYEPYLIQCGFMKRTPRGRMATVKAYKHLNLTD

SEQ ID NO: 435 - protein, 358 aa, Lawsonia intracellularis
MINLLNITYPEFESLIVTTLQEKTYRAMQIWQWVWQKQITDIESMTNLPQKIRASLTALIKINLPEIVTIQQSSDGTKKFLLRLSDGALIETVLIPSIDKAGNIRITQCLSSQVGCSMGCTFCSTATMGFIRNLTAGEIVSQVLLAKLHLNDNKPDKPIIRNIVFMGMGEPLLNLTELTRALHILHSEKGLNFSARRITVSTCGIKKGIQALSENGLAFLALSLHASNQELRSTIMPKAAKWDLKELIDTLKNYSLKKREKITFEYLLLGGINDSPEHAKELAKLITDIKGKLNLIPYNPAQGQPYLKPTEENILKFQKVLWSKGIVTILRKSKGQDINAACGQLKTTYLSQSSSTIY

SEQ ID NO: 436 - protein, 322 aa, Lawsonia intracellularis
MEKALIQVSPQLVVLIEAEIWPGLLFACNKRNIPVLVLNGRVREKSLRGYDWFSWFFPEFWRAIAPKYVAAISSADAARFTALFGEYCVGVVPNIKFDRAICTLSQSDSSKNVLTEILPDKPIILLASVREEEEALLVPVIKKLYSRHGKDTCIIVAPRHESRVKEWIKKLNFVGITTQLRSVLTPYKEELYQTSIPVIIWDTFGELDKLYNLAQAVFVGGSLVPLGGQNFLEPLSVGKIPCVGKYLDNFSWVFEPLNVEHEDFSFFIRICHTPFELIEQLERQLQHPEPKEEIISRFNTWLESRKGGADKCASLIISMLEQ

SEQ ID NO: 437 - protein, 432 aa, Lawsonia intracellularis
MFPNVQHKLGVVFFPAFDWAISPTHPEREERLLYTQDQLYEEGIFDIPGIQEYQPSLSTYCDIESVHFCLPNVGAVCSNSHLASAGGAIHASKLVLTGEVERAFAIIRPPGHHAMRVTYGNRGFCNINIEAVMVEHIRQTYKKQKIAIVDTDCHHGDGTQDIYWNDPNVLFISLHQDGRTTYPGTGFLEEVGGPAALGKTVNIPLPPGTGNEGYLYAMEHVVLPILDEFQPDIIINSAGQDNHYTDPLTNMYLTAEGYACMTQMLKPDIAVLEGGYSIQGALPYVNLGICLALAGLPFSYLQEPDLDKVDICQPKRVTETIKKVCEQALSQYFYPPVKPYDGQQDGCWWVRNRTIYYDTDMIHDTQYERIRLCKTCNGLTAIETKSTCLDEALCLLFPRGACSSCCSEAESLKRQWVQTRNSNILEINPNKS

SEQ ID NO: 438 - protein, 561 aa, Lawsonia intracellularis
MQVQLRNVSDSSQNLENVQATENKQKANTQDGQPRVGKGAIPRIMAALNSAVNFVSSTLQEYKTAILTTTQSTSVQQNEIRLQNRDLISQMLDPNQPQPFPNAIDNATKQTIKDLAGISHKEVGSITSTALNNLSMSITKLETKLTDDIMTSLLTTEMKNILLKDVVVQNLKNELGTRGVPNDEGAMATLLMTKQYEMGALARTPNENLQKTIENLVTSMSDNAVTQRNYTQAKNEIQTHTGRYLIRLMANQSYMPVVAINARADNASLAHLFKYDSIHGPFKGSNSYDDDGLIINGHHINVSRKKVGEWIWKDMDVNLVVESTGAIKTRDGLEAHIQTGAAKVIISTASKDTDALIIMGVNDSDYLPKDHHILSAGSCTTNCLAPVVKVLNDVFGIEHGVMTTIHSYTMSQRILDGSQKDLRRARAATLSLIPTTTGAAKAIGLVIPELEGKIDGMAIRVPTPNVSLVDFTCELKQPVTVDDINNTLKNAAEGKLKNILGYCDEPLVSIDYTGDIHGGVVDALSTSVISSKLAKILVWYDNEAGFTNQLLRLINLVEKSM

SEQ ID NO: 439 - protein, 338 aa, Lawsonia intracellularis
MSLISLPEWFKKNTGCFLKNDILLSADRQKKYIMDDGVWKSTTNSNSNKQLQTSNIFSYKWNQEKTYTSPALLKKTQEWLKSRYDYIYIYLKAIQDHPIFLDAGCGAAFSTLELLGDCFHQLNYIGVDISDAITIARRRIQDAGYDGIFLQENLMDLPFKPESIDIIFSEGVLHHTDSTKEAITKLTPLLRNGGLFLFYVYAKKSPIREFSDDYLREQLHKLSPKQAWDALKPLTELGIQLGESNMELNLPNGIELLDVPAGKIKLQEFFYWYILKAFYAKELDFDAMQHINFDWYAPQNAHRQTPEQISQWCDELNLNILSMKTELSGITVVAKRQC

SEQ ID NO: 440 - protein, 626 aa, Lawsonia intracellularis
MCGVCGIICLDGDKPSKEVLSHMLDAIRHRGPDKANVVVDGCIALGHCRLAILDLTDAAAQPMSTSDKLFTIVYNGEIYNFEEIRRELIKLGHTFISRSDTEVILHAYIQWGAQCVTKFNGMFVFVIYDVIRKQIFIARDRYGIKPLYYTIIQNNFLFSSEAKAFLRYPQFCTKLDYEALLEYFTFQNILTDKTLLHNVYIFPPGHYAILPLNTGQLTFSQYWDYCFDESKNIHSDKEYEEELTYLIQQAVQRQLQSDVELGTYLSGGMDSGSITALASKRFPYIKSFTCGFDLHSISGLELAFDERNAAEAMSYLFKTEHYEMVLKSGDMERVFPRLAWHIEEPRTGQSYPNFCIAHLVSKFVKVVLAGTGSDELFGGYPWRYYRALGEKGENSFEKYIDRYYLFWQRLIPNRYLLSMFKPIETHVRHVRTRDIFRNIFGDNNSPVTSHEESINRSLYFEAKTFLHGLLVVEDKLSMAHSLETRLPFLDNDLVDFAMRLPVRCKIHRLNETLRINENESAKASRYYKKTNDGKWLLRRAMERYVPTHIIEAVKQGFSAPDASWFRGESIDFVHRYLFSQNVRLYEYFDRKVVHELVTEHLEGNANRRLFIWSLLSFEEWLHQYLP

SEQ ID NO: 441 - protein, 302 aa, Lawsonia intracellularis
MAAVEAWCKLLRPVKVVVDGGNGVGGTICADILKRIGAEVTCLYCEPDGNFPHHHPDPVVEENMKDLANKVKAEHADLGIGLDGDADRLGIIDSNGRLLFGDELLSIYARELLVRKPGSIVIGDVKCSNRLFDDIQKHGGNPVMSATGHSIIKARMRELNAPLAGEMSGHMFFSDGWYGFDDAIYGAARLVSLFSAQEKPMSELPGWPPSFATREINIPCKDTIKFAVVEKVKNYFKSQYETIEIDGARINFPYGWGLVRASNTQPVLVTRFEADTEEHLMSIRKEVETPLMQWINEAKENV

SEQ ID NO: 442 - protein, 331 aa, Lawsonia intracellularis
MNVIQFVHNVLRQWPLVQLLLSIGLILFPLQACVAKNSQHNTIHWNLTPEAQVTYGILLLEQSIRIGDKSGVLEAMSILVKHSPAPQFFTDSAAWFLLEKDPITARNILEQGIQLFPDEFGFYLLLADCWLEEGYPVKALESLQAYQLRHPKSDLVRQELAILYLKTENYKEAVDIFSSLPKNYYNAFIRYCYAQSLAALGRSSEAMSQLKLAVQENPEFLEAWFETGKLLEKTGNYSEAIKVYLDLLDKDSGNQSVRLHLISTMLSLKKPDQALKYITESSENYSFCLTAVTLFLENKFYTQAELLLKQIKERPEAAGDINVILYILGAI

SEQ ID NO: 443 - protein, 376 aa, Lawsonia intracellularis
MFLDEHGNQDIVTTNSSSIQSNCCRNICSIGMTRCLITNLIAGACGGLGVGLGGVIAEFTDPSMMLAATSGGGLACYFFSMLAAYYYGGIIVSKEKRENLEAIDRRMQSLIEESISRGRRRSILVGHQGQPVTTQPSVAAGPSAHLRGVIVTEQPVAVGASASVGASSTRGSILRSSQRGDQGTEGLQNRSRWGEQDTDPIYEDVWTYAVELIPGYSYEGQVGSLLGMQCVLTGVSIQVPQKLRRLALKAYEKIPQMYLSLQGNKVSSPSIANYGKLLKATKNFANQKQKHIPYYVFAFTDDYKANLERKVRSGQAGIIAELCNGVHFGLTYSRHNDEKKEYTGMQLGKGRGSVKAKSEIESIAADHFNNYLNSLN

SEQ ID NO: 444 - protein, 500 aa, Lawsonia intracellularis
  misc_feature (220)..(220): Xaa can be any naturally occurring amino acid
  misc_feature (222)..(222): Xaa can be any naturally occurring amino acid
  misc_feature (225)..(225): Xaa can be any naturally occurring amino acid
  misc_feature (227)..(228): Xaa can be any naturally occurring amino acid
MYNIINKHQIIKILLFSLCVFFFTLTEKQKIYAADVFFEGRTETLINVNKPFDSFFGGSDSTIGTLETGPTNLTFTTVGAFRNSVFRIIGGGRSSFNNPNTVKGNVTLTVYNTDVERIIGAGISNRGLVNVTGSVNMKLENVSVTRGIYGGVYTQNGHVLGSINMHLKNVQTPLLIGSGVSNGPNRITVNGDINIDVEDSRIQYVNITGEVDAGIKGNAXLXVKXSXXELINSGRGNILGNLKISIADSNIRGLSPVDFGSSVYGDTSINVINSQINDITLIPRAGGMLVGPVTLDITSSTIQNIQCGPVSQNNQLNTLNVTVNTSNITNLNLGSVEGHTISTTATVTDSNITNLNVGTFNGLGVTENASVIINSGNITNLNVGTNVIAAATTINSSATIHDGLIANLTLGSQGNGRTMIATANVNGGTIGLLTMGSENFIPGTRPITELAILNMSGGLIERIIVGNANSSTINFTPGKRSIVKTINGPELPYLVNIQKD

SEQ ID NO: 445 - protein, 528 aa, Lawsonia intracellularis
MVWESYPIFWISIAFCLTLSLCLFFIYLILKSNKITMLSSFPRGCWTIITLIILFLFAYGQINTTLFPLRWSNAYFSINKDLAILGLNPIQNLYDTYKIMSAIPPDIAATHTSYPRIAEWLNVTNPNEKNLNFIRVIKGHKQSTPINIVIIIMESLAWPRTSLAPGEDNPTPNLKKLAKESLLFPFFFAPARTTARAIFTTMTGIPDVNRSGGTSSRNQKLIEQHLIMNEFKGYEKYYMLGGSASWANIRGLLDHNIEHLQLFEEGKWNSPSVDVWGISDLDLFREAIKIFNNSPLPFIGVIQTSSFHKPYTIPSDNAGFIKLNPTPELLANYGYTSDEEYNSMRFADHALGEFFALAKTQPWFQNTIFAIFGDHGLNDPSLNMTPGYLACRLQSNHIPLLLYAPGRIQPGEYPYPCGQPDIFPTLASLAGITYHNQTMGRNLLDPATHHDSKQFIAGETEAFIRLVQDGYCYIKEETEGLYFLADTECNNLIEKESERTQSMRQAATDFFAIAKYMLYNNKRPNKEN

SEQ ID NO: 446 - protein, 346 aa, Lawsonia intracellularis
MSIYSVEDAIQDIRQGNMIILVDDEDRENEGDLVIAAQHVTPEHINFMTKYARGLVCLPMESTLIDKLKLPPMSQVNNSKFGTNFTVSIEARQGVTTGISAADRAHTALTAIDDNVQPEDIVTPGHMFPLRAQPGGVLTRAGHTEGSVDLVQFAGLKPAAIICEILNDDGSMARMSDLEIFASKYNLKITTISDIIRYKMKLGKLTVKQVARANLPSKFGTFEVIAYENGINSDTHLAIIKGNVNNTEDDSPVLVRVHSECLTGDVLDSLRCDCGGQLSAALRQIEREGRGVLVYMRQEGRGIGLANKIKAYALQDKGYDTVEANQKLGFKPDLRDYGVGAQILVE

SEQ ID NO: 447 - protein, 884 aa, Lawsonia intracellularis
MLTVNDIRQKFLGYFKNYNHQEIPSSSLIPRDDPSLLFTNAGMVQFKKVFTGQETRNYLRATTAQKCLRVGGKHNDLENVGRTARHHTFFEMLGNFSFGDYFKKEAIQFAWAFITEELNLSKEFLYITIYKDDDDAYDIWVNTIGVEPSRIYRMGEKDNFWSMGDTGPCGPCSEIHFDQGETFCCGDNCGIGSCDCDRFLEIWNLVFMQYEQLPSGERVILPKPSIDTGMGLERIVAICQQKSSNYDTDLFQPIIQYMASIAGVHYKKHEETDIALRVIADHSRAIAFMIADGILPSNEGRGYVLRRLIRRAFRFGKQIGMNQPFLYKTVNKVVELMGDIYTELYSRSEFMSRVVFDEEERFSITLDKGLILLEAELNALKEKNTKELPGDIAFKLYDTYGFPLDIINDIASKKHFAVDEANFQHLMQEQKERARSQWKGSGEKRIEACFQTLLEDGMQSEFIGYENLSGTGRIVALLDIDGLPIEELPTKSSGYVITDMTPFYGTSGGQTGDIGILSTITGKTQVVDTLKPATNLIVHVVTVTSGTILLDQEALLVVSESERLDTARNHTCTHILQSVLQKILGDHVRQAGSLVSPTRLRFDFTHIAPLTEEEIHAIELQVNTIIMANLPLRVEFMDQQSALEKGAMALFEEKYGNIVRVVTIGSENQTASIELCGGTHLTSTGQAGCFIIVSETGIAAGVRRIEAITGRNTLAYIKEYQKELSTTAAILKTKPEKVVEKVTSILSENKNLQKTVDTLESSSLSNQGKHLLDNLTRINNIDVLTANLKNFSLKALRDIMDDIRSKLSSGIVCLASTEGTKVHLLLYVSKDLHHNFTASELIKKIVVPIHGAGGGRPDQAQAGGTNPSGLSETFELLKNILEDQ

SEQ ID NO: 448 - protein, 565 aa, Lawsonia intracellularis
MSQTEHHISIEQEMRKSYLEYSLSVIIGRAIPDVRDGLKPVHRRILFAQQELGNSYTRPPKKCARIVGDVIGKYHPHGDSAVYDALVRMAQDFSMRDPLEEGQGNFGSIDGDAPAAMRYTEVRMSRLASEFLSDIDKETVDFRPNYDNSLEEPIVLPTKVPNLLLNGSSGIAVGMATNIPPHNLGELCNALLKIIDDPDVPIDNLLNIIHGPDFPTGGFIYVGQGLYDAYTKGRGTVKVRGKVEIEERKKGAQSIVIREIPFGLNKSSLVEKIAILVNERKIDGIADLRDESDRKGIRVVIELKKGVIPEIIINALYKFTPLETSFGINMLAVVDNRPQLLTIKSALTYFLDHRREVIVRRTRFELNKAEARLHILIGLIHALDHIDEVVNLIRSSSTPAEAKIRLIERFSLSEIQAQSILDMRLQRLTGLEREKLEEEMHELQTKIAWYESILGDTKILWGVIRDEVTGIKEMYTTPRRTEVIRETLTNIEIEDLIPDDDVVITLSRRGYIKRTNLAIYQQQRRGGKGVAGLHTSEDDFVQEFITTTNHQFLLLFTNKGSGNIM

SEQ ID NO: 449 - protein, 320 aa, Lawsonia intracellularis
MGAGIGEEDTDYQKLRYYKIVIMTDADVDGAHIRTLLLTFFFRNYVGLIERGHLYIAQPPLYRVHNSKSEKFIKDDPSLNDFLLHRVSSELEIQTESGKLLKGSDIITTMKQIESISQRTKDAELAGISENLFMLLITSPKKLTSDVLSSLEEIQLYLNTSGYNITVENESHEDGDRLFTIFENKNGHKTRIPADFFASKIYSSTWDVMDSLLTMCGGINFIVFHSGTSHTINDLFKLYQFTLDEARKGINIQRYKGLGEMNPEQLWVTTMDPQNRTLLQVTINDAEEANETFEQLMGERVEPRREFIERNALNVRDLDI

SEQ ID NO: 450 - protein, 314 aa, Lawsonia intracellularis
MDFIELQKNLGFILLPLSYLYTLVMRIRRAIGKIGLLGRLDPYCPCISVGNISWGGTGKTPVIDWLLDWAEQKQLSVSVLTRGYKSDNSSTILPLYVKPHHKPKEVGDEPLMLALEHPNASILVDPNRIRSGRYAVQVLKPDLLLLDDGFQQVGVKKTLDFVLLSEEDLTKQWNRVIPAGSWREGSQALEDASAFLIKADKEKMQSLLPIIQNRLFHFGKPVFSFYLKPVLLKGAGLSEAVTAKEFAGRSYILVTGVGNPNQVLHTVESYLGYSPETHIIRLMTYPQRDWCYKSCNESPKSRLWNISHSKANTT

SEQ ID NO: 451 - protein, 322 aa, Lawsonia intracellularis
MKKNFFYFIAVVITLVIAFITYNNKVNNKLPVVAIANYGPHTSLDAVIAGFKEQMQVEGFTENQLSAMKLQMSALITLSYHKHSKPKSSSPKAMVVISTPIAQFAKGKIKNLPLIYSSVTDPVGVGLLQEYNKSDDNMTGSSDMQDLNSLLQFAKFLLPNAKSIGLLYATSDSNDTSLVKMMQSAASEYDMSVVAIPVEQAREVPIRMQGFKGKVDLIYVGVSGPIQPTLPAIAVEAHKMRIPVFNADIQAVRDGLVIAGLGVDYYAVGRNTGKLVSAILHGEKISELVPIYPSAQDHHGVINKKLAIELGIAIPSNIEIVE

SEQ ID NO: 452 - protein, 492 aa, Lawsonia intracellularis
MASANFYNLAVIDNIPFGLAGMQGHFFALRLELPDWKGWAPGQFVMIRPQSWNLEIPWARPFSICRVTKEELVIFFQVSGKGTERMAYLRSGNMVHLWGPLGNRFSTEEKPTLILAGGIGIAPFIGYIDSHPNPKNLYMMFSHKYPNDCYPIENLSEKVNFFSFQENTLQDREVFLEQVSTQVKNYAACNGLILVCGPTPFLKFVQSIALENNGRTQLSLDYLPLNSQLYRVTEFTYQNYEPSVNIGGFELWAAKDSCLSTMLPVCDTVDYLHIPIVNVHDYITQNASITVRDNVLKIVGGPYDPFVYNLMSAAKIQPISVCLNKWCLFSIDITNSHMGTFQLFFNFDDKGYNENNSVTFRIPAFEKPMTFQAMLPIPHDAQTLTDLRLDCPDNTHMEVHSMKIAMLDRPNIPLTVSQIFETRQIPYLWAQYNKKHAITNQRLITLARNITLQKNITYDVPLPKYTSDSIAQYLDFSITSPVGGTITLYIKD

SEQ ID NO: 453 - protein, 400 aa, Lawsonia intracellularis
MDRAHVFATDPLGYYYLAGIFGSFPSDIDGEIKRYGLKIRKFQLGNNSLYEQNRLFVYQFLMELYGFPVASERRTSAALFSRRLHKMGEHFMVRVLGQSDRVITTIWNNGGNRLYPRVEKVALIRVEPGQKEVIERLSKGSYFVDPKNYIAIIRIKYKQHRYNHDNVRQERALSVESQEIIHPLTGEILEDVNIIKDTSTIILHLNDIVRGEYVGRIVYKRNELIENTETEEKRLKFLFAWLSKNQRRLVSYSDEFFTSMVKILEGYLHAPNHKDLFEEYGDLYHEVMNKYAYIRQARMVKHLEDIMSRNVKGVRISYNKMLLEAVKILRELKFELVTYFDQITATVIHHIETILDDRYLRRTYIENPKKELTPAGYEIRKNYGRLVSLHDTFISIQSSR

SEQ ID NO: 454 - protein, 360 aa, Lawsonia intracellularis
MTIQVKTRSIEELVPHTYTYQGRSAISHLFCVASSLDSMVLGEPQILGQLKDAYKLATIAGASKTILNRLLHKAFSVAKRVRTETSIASNAVSISYAAVKLAKKIFGTMNQYKAMLIGAGEMAELAAMHLMQAGIQQLKIVNRTYSQAQELASQFRGEAIPFEKLVTYLAEVDIVISSTGAPQTIIHFNDIKNILSKRKHYPMLFIDIAVPRDIDPNVHQLDNIYLYDIDDLKEIVEDNIVQRQDEAIKAKHIIQDEIDSFCAWLQALILQPTIVDLRKRFSTYAEEELERTLKKIGPVDRKTREALETMIDALIRKLTHDPISYLKCAHRTIDTNHITLARQMFNLDKIPQTNKAVNED

SEQ ID NO: 455 - protein, 328 aa, Lawsonia intracellularis
MFIGGWIGDKIIGTQRTLLAGAITLLCGYLILFIGTNGTITMALSIIIAGNTLFKANPSTLIAKIFPYEHPKAESAFTLYYMSINLGSFISMLIVPYLYTAFGFHMAFGSSVIGLTLAILAFIIKRKWLVGLDSPPGFEPLSLGDIVVLLSIVIGISGISMVLLSHLYIAYTMLYCAAIIVLLMIFREIKLSNSQERKKLIVCLFLIVEAVGFYILYQQMPTSLNLFVIRCTDHMILDFPIEPAAFQSLNPVWIIAASPIMAYIFSHSAKYVSLPSKFAAGMFCCALAFLSLGVAASYTQSCEGIISGNWGEIFGYGRRHDSSPCVDQ

SEQ ID NO: 456 - DNA, 2694 bp, Lawsonia intracellularis
atgacaaaacgcctgaatatatttcttctactgttactgtgtaatatactttattgtaatataatagccaatgctgcttcaaaagacgatccttctattgtggttctcccatttcaaattaatggctcatcaaatgatgaagagttacaaacagaactaccaatgcttcttgcaactgcattaaagaataagggatttcgtgtcatccctaataaatctgcattaaatcttctatataaacaaaatatctcccaacttaatatttctactgcaaaaaaggtagctcaacaactccatgctgactatgtagtatacggcagtttcaatcaaacaggtgaaaattttagtattgatagtaggcttattgatagtacaggtgtagcatctgcacgtccattatacatagaaaaaccaaaatttaatgagctaaatattgctgtaacagaacttgctgaacgtataagtaatggccttataaagaaaaacactattgctgatgtacgtattcatgggcttaaagttcttgatcctgatgtaatccttacacgactcactattaataagggagatcatactgatcatgccaaaattaatgcagaaatcaaaaaaatatgggaattaggatattttagtgatgtctctgcaagtattgaagaaagcggggaaggacgattacttgtatttactgtacaagaaaagcctaaaattacagatgttgttgttcaaggctcaaaagctgtaagtatcgataacattcttgctgcaatgagttctaaaaaaggatcagttattagtgatagactattgtcccaagatattcaaaaaattaccgacctctatagaaaagaaggctactatctcgctgaagttaattatgaaataaaagagaaagaaaatacttcttctgcaacactattgttaacagtaaatgaagggaaaaaactttatattaaagatgtccgaattgaaggacttgaaacaataaaagctaaaactttaaaaaaagagttagcattaacagaacgtaattttttatcatggtttactggaacaggtgtattacgtgaagaatatcttgaacgtgactctatagcaatctctgcctatgccatgaatcatggctatgtagatattcaagttgcttcacctgaagtaacattcaatgaaaaaggaattgttattacatttagagtaaaagaaggtaagcgctataaaataggaaaaatagactttaaaggagatcttattgagacaaatgaacaactccttaaagtaacaaaaattgatgatcataaaaactatgagcagtatttttctctttctgttatgcaagatgatgtaaaagcattaacagatttttattcagattatggttatgcatttgctgaagtagatcttgaaacaaccaaaaatgaagaagatgcaacaattgatgttactttccttattgataaaaaacaaaaagtctttcttcgtagaataattgttgaaggaaatactcgtactagagataatgttatcctccgtgaattacgccttgctgatggrratctttttaatggtcaacatctccgacgctctaatgaatgccttaaccgccttggctattttaaccaagtagatacagatacactgcctacagggaaagatgatgaagttgatctacttgtaaaagttcaagaagctcgaacaggtgcaatcacaggtggtgttggttactcaacacattctaaatttggtgtttcaggaagtatctcagaaagaaacttatggggaaaaggttatattttaagtattgaaggttttatttctagtaagtcatcttctcttgatctttcttttaccaatcctcgtgtttatgatacagactttggctttagtaataacatttatacgctacgagatgaatgggatgacttccgtaaaaaaacttatggagataccatacgtctatttcaccctataggagaatattcatctatctttgttggctatcgaattgatcaatatcgtctatatgatattccatctacagcaccacgctcttatcttgactatcaagggaaaaatatttctagtgtagtaagtggtggttttacttttgattctacagacagtcgtgagagaccatctaaagggcatattgcaaaactaattgttgaatatggaggtggtggtcttggtggtaatgataacttcttcaagccaattgctgaactacaaggattttactcaatttcaagaagtaaaaaccatataatacattggcgtacacgtgcaggtgcagcttataagaatagtaaaaaacctgtgccagtatttgaccgattttttattggtggtatagatagtattagaggatatgatacagaagatcttgcaccaaaagatcctcgctttggagatgaaattggtggtgataggatggcttttcttaacctagagtatatttggacattccagccagagctaggtcttgcattagttccattctatgacataggattccaaacagattctgtacaaacttctaacccattctctaaactcaaacaatcatatggccttgaacttcgctggcgttcaccaatgggagatttgcgatttgcctatggtataccactcaataaaaatgttagtggcaaaaaaactcgtggtagatttgaattttcaatggggcaattcttctaataa

SEQ ID NO: 457 - DNA, 756 bp, Lawsonia intracellularis
atggccaaacataaagtacgtgctgatgaacttgtttttttacaagggttagcagaaagtcgtgaacaagctaaacgacttattatggcaggtaaggttacattaactaataattctacaactataccattacgtttggaaaaaccaggacataaatatccattagaaagtatctgcagtttaataggggtagaacgttttgtgagtagaggagcatataagctattaactgctctagatttttttaaaattgatgtaaaaagttgtatttgtcttgatscaggcgcatctactggtgggtttacagattgtcttttacaacatggagcatctaaagtatatgcgattgatgtaggcaaaggtcaattacatgagaaactgtatactaatgaacaagttataaatattgagggagtgaatttacgtacagcatctaaagatcttattcctgaagaagtagatattttaactattgatgtttcttttatatcgcttactttgattttaccgtcatgtatacgttggctaaaggcttccggaattattattgccttaataaagcctcaatttgaattatatccagataaaataaaaaaaggtgtagtaaaagaaactagcttgcaatatgaagcagtagaaaaaattattcatttttgtcaatcagaacttggacttatatttattggtgttgttccgtcggtaataaaaggtccaaaaggaaatcaagaatatcttatttacttgaaaaaacgttaa

SEQ ID NO: 458 - DNA, 38 bp, Artificial
  L-Primer for OMP85
ggtattgagggtcgcatgacaaaacgcctgaatatatt

SEQ ID NO: 459 - DNA, 37 bp, Artificial
  R-Primer for OMP85
agaggagagttagagccttattagaagaattgcccca

SEQ ID NO: 460 - DNA, 38 bp, Artificial
  L-Primer for Hemolysin
ggtattgagggtcgcatggccaaacataaagtacgtgc

SEQ ID NO: 461 - DNA, 40 bp, Artificial
  R-Primer for Hemolysin
agaggagagttagagccttattaacgttttttcaagtaaa

SEQ ID NO: 462 - DNA, 18 bp, Artificial
  Specific primer sequence for L-Primer of OMP85 for LIC process.
ggtattgagggtcgcatg

SEQ ID NO: 463 - DNA, 20 bp, Artificial
  LIC primer sequence for R-Primer of OMP85.
agaggagagttagagcctta

SEQ ID NO: 464 - DNA, 18 bp, Artificial
  LIC primer sequence for L-Primer of Hemolysin.
ggtattgagggtcgcatg

SEQ ID NO: 465 - DNA, 20 bp, Artificial
  LIC primer sequence for R-Primer of Hemolysin
agaggagagttagagcctta

SEQ ID NO: 466 - protein, 251 aa, Lawsonia intracellularis
  misc_feature (94)..(94): Xaa can be any naturally occurring amino acid
MAKHKVRADELVFLQGLAESREQAKRLIMAGKVTLTNNSTTIPLRLEKPGHKYPLESICSLIGVERFVSRGAYKLLTALDFFKIDVKSCICLDXGASTGGFTDCLLQHGASKVYAIDVGKGQLHEKLYTNEQVINIEGVNLRTASKDLIPEEVDILTIDVSFISLTLILPSCIRWLKASGIIIALIKPQFELYPDKIKKGVVKETSLQYEAVEKIIHFCQSELGLIFIGVVPSVIKGPKGNQEYLIYLKKR

We claim:

1. An isolated or recombinant immunological protein that is selected from the group of:
1) a polypeptide comprising a sequence selected from the group consisting of SEQ ID Nos. 1-455, SEQ ID No. 466, or the polypeptide encoded by SEQ ID No. 456 or SEQ ID No. 457;
2) any polypeptide that has at least 85% sequence homology with the polypeptide of 1);
3) any immunogenic portion of the polypeptides of 1) and/or 2)
4) the immunogenic portion of 3), comprising at least 9 contiguous amino acids included in the sequences of SEQ ID No. 1-455, SEQ ID No. 466, or the amino acid sequence encoded by SEQ ID No. 456 or SEQ ID No. 457; and
5) a polypeptide that is encoded by a DNA that codes for a peptide comprising the sequence of any one of SEQ ID Nos. 1-455 or SEQ ID No. 466.

2. An isolated or recombinant DNA molecule that includes a nucleotide sequence which encodes for an immunological protein selected from the group consisting of:
1) a polypeptide comprising a sequence selected from the group consisting of SEQ ID Nos. 1-455, SEQ ID No. 466, or the polypeptide encoded by SEQ ID No. 456 or SEQ ID No. 457;
2) any polypeptide that has at least 85% sequence homology with the polypeptide of 1);
3) any immunogenic portion of the polypeptides of 1) and/or 2)
4) the immunogenic portion of 3), comprising at least 9 contiguous amino acids included in the sequences of SEQ ID No. 1-455, SEQ ID No. 466, or the amino acid sequence encoded by SEQ ID No. 456 or SEQ ID No. 457; and
5) a polypeptide that is encoded by a DNA that codes for a peptide comprising the sequence of any one of SEQ ID Nos. 1-455 or SEQ ID No. 466.

3. A vector comprising a DNA molecule according to claim 2 or the protein according to claim 1.

4. An immunological composition comprising the DNA molecule according to claim 2 or the protein according to claim 1.

5. The composition of claim 4, further comprising a veterinary acceptable carrier.

6. A method for the prevention or treatment of an animal against Lawsonia intracellularis infections comprising the step of inoculating said animal with a product selected from the group consisting of an immunological protein according to claim 1, the DNA molecule according to claim 2, the vector according to claim 3, or the immunological composition according to claim 4.

7. The method of claim 6, said inoculation occurring intramuscularly, orally, or intranasally.

8. The use of an immunological protein according to claim 1, the DNA molecule according to claim 2, the vector according to claim 3, or the immunological composition according to claim 4 for the preparation of a medicament for the prevention or treatment of an animal against Lawsonia intracellularis infections.

9. A method for the detection of antibodies in a sample, comprising the steps:
1) Contacting a sample comprising antibodies against Lawsonia intracellularis bacteria with a protein according to claim 1;
2) Incubating the mixture of 1) under conditions which allow the protein according to claim 1 to bind to the Lawsonia specific antibodies of the sample and to generate a complex of Lawsonia specific antibody and the protein according to claim 1; and
3) Detecting the presence of the complex of 2).
